United States Patent Application Publication US 2002/0120116 A1 - sequence listing, part 2

SEQ ID NO: 407 - DNA, 4053 bp; double-stranded, linear
atcccggggaatgagccaatctatcagcaagctgcagtagcgttaccgcttggatgaaagaaaatcactatgatctagtttatggcggtggcaatgttggtctaatgggtacggtggctgacacgcttttagcagaaggtggagaggtaattggtgtcatgcccacttttttaatggaacgagagattgcacataatggcattacaaagatgcatacagtcagtgatatgcatgcgcgtaagaaaaagatgattgaattggcagatgtgtatttagctttacccggtggtcccggcacgctagaagaaattagcgaggtgatctcttggggccgagtcggtgaacatatgaatccttgtattttatacaacgtgaatggttactatgatttactagctgctttttttgataaaatggtagaaactaatttcttaacagaagcggatcgagctaaaattttcatttcagattccttagaagaaattggtgcatttattgattcctatgaaccgccaatgattcgtcaatacaaaaaataacaaaagaggcagtcactctaaccagaatgactgcctcttttttactagtttttcgttaaaatccgatgtaagaactcttttgtccgagcttcttttggatggacaaaaatatcttcagcggtcccttcttcggcaatgacacctttatccatgaaaataacacgatcggatacgtcccgcgcaaattccatttcatgtgttacaatcaccattgttagcccagtatgggcaagatttttcatcgtttttagcacttcgccaaccatttcaggatccaatgcagaagttggttcatcgaaaagtaaaacatctggatccattgataatgctcgagcaatggctacccgttgcttttgtccaccagacaattgagcaggtttggcatcaataaaacgagccatgccaactttttctaaattttctaaggcaatttttttggcttcttctttgtttctttttaggacagtcatctgaccagaagtacagttttctaagacattcatgttattaaataaattgaatgattggaaaaccatacctaaatgggtccgatatttgggcaaactataaccacgttctaaaacatttttaccattatagatgattttgccatctgttggtttttctaacaaattaatacaacgtagtaacgttgatttaccagaaccagaagaaccgataatggtgacaacttctcctttgttgacgttcatattgatatcttttaatacttcgttttcgccaaagctttttcgtaaatgttcaatttcaataattgcactcatctgtttgcctcctagctttcttttccttcttcagttaattcttctactttaacgtaagcagaagggccatccattttacgttccacaacacgtaagattcgtgtgatcacaaaagtcattaccaagtacatgatgccgacaattgtaaaggtttggaagaactggaagtttgcgccagaagcagcattcccttggaagaataaatctgcaacaccgataacacttaacacggccgtatctttgatattaatgacaaattcattccctgttgcaggtaaaatattacgtaatacttggggaataacgactttacgcattgtttgtccatgggtcatcccaatcgcttgtgctgcctcgaattgtcctttatctactgcgaaaatacctccgcgaacaatttcagacatataggcaccagtattcacagaaacgataaataatgcggccactgttcggtctaaagagatgccaaaagctagagctaaaccatagaaaataaccattgcttgaaccatcattggtgtaccacggaaaacttcaatataaatagaaagaattaaatttcctaatttttggaagaaacgagcgactgggttttcagaatctggaattgtacggaagacaccaatyagtaaaccaagggttgttccgacaactgtcccaattaacgcgataaatagcgttaaaccagcaccacgtaaaaacatgtcgccatattgattccaaatatttttgaaatcgttaataagtcctgttttttgttcatcactatctgttgctgcaggttgatccttgattgcttggtccataatttttgtccgttcatcttgagaaatacctgctaaaattttgtttactttttcaatgtctggatcgcctttacgcatgccgactgctacttgcgagtcttcagcgctagcatcaaagcccttttcttttggaaatctaacatttttaattctttattgacactagttgctgttatgccttcagggcgttcactaacatacccgtcaatcatgccagaagcaagtgctgttcgcatagctgaaaagttatccattgcttgctgtttattgacatttggaatttgatcaattaatccgtagtggaatgtatttagttgagccgtaattttagcatcagctaaatctttcaagctttttgcattagcgtatttgccatctttttttacaattacgacaaattgtgattcataataagggtttgtaaaagcaatttctttttttcgttcagcggttgggctcattccggcgataatggcatcaatttttccagattgtaaggcgggcgccaagccatcccatttggtttggacgattactaatttacgacctaaaccatcggcaatttttttagaaatttgaacatcatagccgcctgcataagagttgccttgaataggcactgcgccatgtgcgtcatttttctgtgaccagttaaaagggcgtagccagcttccatgccgacacgaaattcaccattttcctccgccgaagcgttggttgtcatgccaagtaacgaaaatagcgtgacaagtagtagactgaatgaaaaaacttttttgttcatctttttctctcctttaamtttcttgtctgattgatcgttttgtcttttttcaatcaacaagctttgataatcagctgagcaaaagcgattctgtctttttaaaggagaatacttctgtcacaacctatttttgaatacaaaaaaacaaccaaacagatgtaaggttgctaggtaatgtcgaaaaaaattcctcaacgaaacatagcacaacttagcatcactactaagacagtccgcaagctcttaacttacgtcccaacacacaacagaagaggctccgttatgcatttcggcgattgatcctaaacttgcttcccagtgtcctctcactccacaagcgtaataaaaaccgcgacctctacctcttttttgaggcactattcagttattaaattcagttattaattttaggataaatccagaagaaagtcaatatgttccagcaaaggaatttatcaagaggacacaaacaccatgaattaacgtaacattttccctacgaaatagaaactaatacgaaaaaagcaaccattcctaaaggaacagttgctttttacttaagctttgacagcttttggttcacgacctaaaatagcttgaagaacagtcaatacacctaaagaagctaaaattgtataaattagacttgagtaagttaagataccgaaatcccaagttttgtaaactaataaaacaattgctaaggcgataatagcgataacgttgaagaacgcaaaagcccaaagatttccgttttctttacgagaaagataaaaaacagagaaccaaatgcttaaaacgccccaagcgatgcaggcaataattgcagcccaataaataataaatgcgaccattgttgtttcacctcacttttactcatgcatattttaccacgagttgagaaatttgtcacaaactctttcaagataaatcaatatataggtaagangttttcmaaaagtggaaaaacttttggtgctaatgttaaaatacgttataatatagaagattaggagctgaatcgatatgcaagatatcacgcaagccgaggcaattcattggttggcaacccaacaaaaaatcacatttntaacaggtgcgggtatctcgacagcctcaggtatgccaaataatgc

SEQ ID NO: 408 - DNA, 1758 bp; double-stranded, linear
taaacatattctttacttgttaaaggatctgttatttttatttaaaaattgttagctagttagagcaaatggttcgtaatcattcggttgattgttcgaatttatcatagtagttaaaacgaaattatcttgtgtatatagaaaacacctactgaagacgcacaatacttccccaagttgtgtatgtttagtaggtgtttatttataattgtatatttgaattataaataaaatacaattgttttgtaaaatgaaaacttgaaatttaaaaaagaaagcggtaaaatatcttaccaaacaattttatttttcattttattactacctcttgtcgccttaccccaatgaggcggctttttttacataaaaatattgaactcaaaaaatagatattgtaaaatatctatacatatttaaactcttattttttcacgcagaccgccttttctcaataaggtggtcgtttttttgttgaaaattgaaaatcagtaaagtaaaattgttatatattaagctataactagtaagaactattttatccccaataagctagttattacttggaccattagctcagctggttagagcaaacggctcatgactattcggtcgatggttcgaattcatcatggtcgataatagaattagacaggtagtgaattattttgaaaagaacaggaattctcttagtgaatttaggaacaccaaaagattcttccaagacggaagtaaggaagtatttaaaaacttttttatcagatagaagagtaataaaaatacatcctataatttggaaaccgattttgaacggtattatcttgaatatacgtccaaaaaaatcagcaaaactctatcaaaaaatttgtactgaaaatggatttcctcttttggaatatactgagaaacaaatggaaaatttgaaaaatatatgtccagaagtggaagttacaatcggaatgtcatatagtgaaccgagtatagaaactgctctagatacattattatcmaaagagattgaagaactcaatgtcataccaatgtatccgcaatactctgggacaacggtaggatcggtgtttgattccgttatgaattattttataaaaagtgataggatagtggatattaaatttattcgatcattttacaataatccacagtatatagattacttttcaaaaaaaataaatgaagctttgaatgaaagtccaatagatgctatcgttttttcataccacggaattcctatgtcttatgtaaaagatggggataactacccgaaggaatgtactaaaacaacaaaattaataatggataaattaggagatattcgttattatcaaacctatcaatcgaaatttgggccatctgaatggttaaaaccagcaactgatgataccttgaaaaaattaccatcaaaaggtattaaaaatatattaattgttgcmccaggttttgttgtagactgtctagaaacaatagaagaattggaacacgaaaacagaaactattttttagaaaatggcggggaagtctacaaatatgttcatccatttaatggagatattgaatttgcmaaattagtaaaggacattatttctttgtagtaatttgttttagtkttttattttagtttgaatttgttaaacaatttattcagggtttgcacgaatatatntactggnatacatataggtagaattaagccaaaattaaacggcctatcccccggtccagtttanggaataagccgcctaa

SEQ ID NO: 409 - DNA, 1091 bp; double-stranded, linear
atgctggcgtttcagctactaaatttctagcaaagaaatttaaaaaagatacggacgtaacaatcacattgattgatcgccattcttaccacactatgatgaccgaattgcatgaagtagcaggcggacgtgttgaaccagaagcaattcaatacgacttacaacgtttgttctcacgcaagaaaaacgtaaaattggtaacagatactgttactggaatcgacaaagaaaacaaagttgtgaaaactttagcaggttcttatccatttgaccagttaattctgggtatgggtggcgaaccaaacgactttggaacaccaggcgtgaaagaaaatggtttcaccttatggtcatttgatgatgcagtgaaaattcgtcatcacattgaagcaaccgttgctaaagcagccatcgaaccagatgctgaagtacgcaaagcaatgttaacattcgttgtctgtggttctggttttactgggatcgaaatggtcggcgaattaatcgactggaaagatcgtttagcgaaagatgccaaaattgatccagacgaaattacattaatggttgttgaagcaatgccaaccatcttaaacatgttatctcgtaacgatgctgccaaagcagaacgttatctagaaaagaaaaatgttcaattattakkgaactcaccaatcgttgaagttgcagcagatcacattaaattaaaagatggttctgaagtaccaacgcatacgttaatctggacagctggtgtgaaagcaacttctgatgccgctgactttggtttagaagcagcacgtggtagtcgtttagttgcgaatgaatacatgcaagcaaaaggttacgaagacaaaaacatttatatcattggtgacttggtttattacgaggaaacaccaaacacaccaactcctcaaatcgttcaagcagctggaacaaacaggtcatactgcggctgccaacatcgttgcagatattaaaggcggcgaaaaaacacgccttttaaggggaactacccagggattcctgggttttccatcggcggcgaaatgggggcgttggccaacttattcngatnaaaattccatttg

SEQ ID NO: 410 - DNA, 1229 bp; double-stranded, linear
tcatctattaactctccataggtttcatttaaggattttggggaaactttataattttgaacttttctttctattactaatttcatgacccagtcaactgcttctaacacttgactgttctctaattccatttctatcattaatkcctcatcgtttatgttagtctgaattgcactcggtactattmcactcttcaaatcacttagattaagaaagttaacagtcatataatttcgatcgtttatttttatagactgtttttttaagttcttatcctcaagaacctttccatgattcattaaaatatatctatcagcatatttttcaacttctaaaatattgtgtgtgaccacgatgattatatgccccttattagataattttttcagatatctccatattttttgccgtctaataggatccacatcattagtaggttcgtcaaggactattattggagaaggatatacaacggccattgcaaatgaagtgagccttctaagtccgcctgaaagtttctgtcctggtatatctttccatccatctatttttaattcttttaaaattttaatacactcttcttcagctattttctgactgcctcctcttattcttattattgactcgacagattgagccatcgttatacctgccaagggagcatgtagttgaggcatcatagagacatattctcttgcaattttactatctctcgcaaatgatagaccattaaatgttatagagccctttgttgatttcgttatacctataatctgattcaacattgttgttttaccagcgccgttatgtccagctatggcagttatttcacctttattaaagcgcaaatttatattatcatttgcatagctctctgatttcttgtactttttacttagcgaatgtaattctaactgttgattcaaagcaaacctcctatatttagacttaattaaattgattgataacaggttggaaccataaccaaattatcattactagcacacttatgcttattactttaataatgattaatttcataattgcgacctcttcaaagtagaaaggattatcaaccacaaaagaaatcaaaatgttaatatctgttttttgtataatgataaattgccacaatatccttgttataagtattgatgccgcaatagaattaactccaacacttttattattcataatcaaaaaaactaacaagaatattgcatccgacg

SEQ ID NO: 411 - DNA, 3721 bp; double-stranded, linear
catcagtattagttggtgtaggncttgtttttggggcaactggaatagttaatgcacaaatgggtgaaggaagattagtaaattattctgcttcaggaaatacgtttcaagaaaatccgggatatacgaagaattataatttctcggatttacaattcaaccctaaagcaataactggtgatgtgttacaaggaaatacaattgattttgaggtttatgggaaacataatattgcagcttcaactgcaaactgggaaattcgtcttcaattagatgaacgattggcccagtatgttgaaaaaattcaagttgatccgaagaagggcgtaggaaatagtagacgaacttttgtaagaattaatgattcgcttggcagacctacaaacatttggaaggttaattacattcgagcaaatgatggactatttgctggggcagaaacaactgatacacaaactgctcctaacggtgtgattacatttgamaaaaatttagatgaaatttttaaagaaattggtgcagataatcttaaaagcgaccgtttaatgtatcgtatctatttggtaagtcatcaagatgacgataaaattgtacctggaatagaaagcactggttactttttgacagatcaagatgatttctataataagttagatgtatccgaaaataattctgatcaatttaagcatggatcggtaaatactaaatatgaagaagctaatatccaaacaaaagacggttctgggtctactggtgctaatggagctataattttagatcataagttaacgaaagaaaagaatttttcttattcaacttctgcaaagggaacgccttggtatgctaactacaaaatcgatgaacgtttagtaccatatgtatctggaatacaaatgcatatggttcaggctgataaagtggcatataatgttgcttttgaatcaggaaaaaaagtggctgatttagcaattgagcgacgtgaaggtcatgagaattatggtatgggttcaatcactgacaatgatttaactaaacttattgattttgctaatgctagtccacgacctatcgttgttagatatgttttacaactgactaaacctttagatgaaatcttagaagaaatgaaagcagcggataaaatcgaagaaaatgcgccatttggtgaagatttcatctttgattcttggttgtcggatacgaataaaaaattaatccagaacacttatggaacaggttattattatttgcaagatattgatggtgatggaaaccctgacgataaagaagagagcggagacacgaatccatatatcgggaaacctgaattagaagaagtatatgatgttgacacaacagttaaggggaaagtattcatccacgagttagcgggaacaggtcacaaagcgcaacttgttgataaagaaggtactgtattagcagaaaaaactatcgctccaaatgaaaaagatggggctccaatttcagatactgtagaatttgaatttacgggtgtagattcaagtaaactaatcgcgaaagatgaattaaaaatccaaatcgtttctccaggttttgataaaccagaagaaggttcaaccgttattaaggaatcaccaaaagcggttgataaacaaaccgtggtagttggatttaaaccagatgctaaagaatcaattcggaataataaaaacttacctgaagatgcagagtattcatggaaaacagagcctgatacttctaacgttactgatagtacgaaaggtattgtaactgttaagataggaaatcgaactttcgacgtggatgtagagtttgctgtaaaagcttctcaagctatggaaaatgatgcaacatacgtacctataacaacaaccccagaaacgacaattcaaagtggtaaacctacatttgataaaccagatgttcctctagctaacgatgccttttcagttttagatgtttataataaggacttcggcaatgcaagtgttgacgcaaatactggtattgttacattcactccagctaaaggtgtaggagaatcggagccgattactggaacaattcctattaaaattgtttaccaagatggttctgtaggcacgaccgatttagcagtaactgtaagtaaaaatatttatgaaaatccaggagaaaacattcctgcaggctaccacaaagtaaccttcaccgcaggagaaggaacaagtattgaaagtggaacaacagtctttgcagtgaaagacggcgtaagcttaccagaagataaacttccggtgttgaaagcaaaagatggttatacagatgcgaaatggccagaagaagcaacgcaaccaattaaagcagatgatacagaatttgtatcaagtgcaacaaaattggatgatatcattgaaaacccaggggataacattcctgcaggctaccacaaagtaaccttcaccgcaggagaaggaacaagtattgaaagtggaacaacagtctttgcagtgaaagacggcgtaagcttaccagaagataaacttccggtgttgaaagcaaaagatggttatacagatgcgaaatggccaggagaagcaacgcaaccaattaaagcagatgatacagaatttgtatcaagtgcaacaaaattggatgataaatctgatgctgacaaatatactcctgaaggtcaaaaagtgactacagaattgaataaagaacctgacgcatctgagggaattaaaaataagaaagatttaccaaaagatgctaagtatacttggaaagaaaaagtagatattagtacagctggaaataaaaaaggtacggttgtagtgacatattcagatggatcatctgatgaagttgaagtagatgtcacagtaacagacaatcgctctgacgctgataaatatgagccaacagtagaaggtgaaaagtagaaatcggtggtaaagtrgatttaacagataacgttactaacttaccaacgttaccacaaggaacaacagtaacagatgttactcctggtggtacaatcgatactaatacaccaggtaattacgaaggtgtcattgaagtaacgtatccagatggtacaaaagatacagtaaaagttccagtagaagtaacagacaatcgctctgacgctgataaatatgagccaacagtagaaggtgaaaaagtagaaatcggtggtaaagtagatttaacagataacgttactaacttaccaacgttaccacaaggaacaacagtaacagatgttactcctggtggtacaatcgatactaatacaccaggtaattacgaaggtgtcattgaagtaacgtatccagatggtacaaaagatacagtaaaagttccagtagaagtaacagacaatcgctctgacgctgataaatatgagccaacagtagaaggtgaaaaagtagaaatyggtggtaaagtagatttaacagataacgttactaacttaccaacgttaccacaaggaacaacagtaacagatgttactcctggtggtacaatcgatactaatacaccaggtaattacgaggtgtcattgaagtaacgtatccagatggtacaaragatacmgtaaaagttccgtagragtaacagacaatcgctctgacgctgatwaatatacacstaraggtgaaaagtagaatcggtggtaagtgntttacngatacgttactacttaccaacgttaccacaggnaccacgtaac

SEQ ID NO: 412 - DNA, 1531 bp; double-stranded, linear
ncaaangagggctaattaatgganaaaaatggattgaaaaaaacmaatattttgttggagcaattggagttattctcattgctcttttttcattccttctttttgaaaaccaacaaaaagaagaagtgaaagaagctataaatacagtggtatcaagtggcttagaggaagcggagaagccaaaaaaacatgtagagacaaaatctagtgaaactgttcaaagtaatcaagtagatgttattactggtacggaagcacaagaagaaacmcctatttcaacagtgatttctttaaccgaaggcgaacgtccgtctgttaaaacgattcaaaatgcccaagaaaattttaatgaagtgtcggattctgttttagggtctattgaaattgattctattcaattaaaattacctattttaatgggtgatagttttgacaatatgctttatggagcgtgtactgttttatcaaaacaaacgatgggaaaaggaaattatgctttagcttctcacaatgctgggtatgaaggattactttttacctcgttaaataaagtttctgtaggagatttggtcaaacttaatgatcgtgaaggacattcgttcatatataaggtaaaagagcaaaagcatgttgatatgactgatacaactatgttgaatctaacaagaaagccaacattaactttaataacttgtgaccaagccacaaaaacaacaggaagaattattgtgattgcggaattagtttagaggagggaaaaagttggttgaaaaaataagggaattgtcaaaagaagaatttgttaatcaatacatgtttgattttaaggtattgatttttaaatctaaaaatcctgaaaaaataactgccaagcaagaaagacttttagaatgtgaaaagaagattgctgtgttgttttatgaaacgtataaacgaaataaaggttatctgcctgatgaaaaagaactggggaggattgttcaaagaaattttcttgaccgtttaaagttatttcgagtggaatatgatgtgattagtgaagaaaaattttgtggtctacacgtacaaatggtcaaacagcaaatgccattagaaaagtatcgaacagatgatttatcttatattttaggtcgagaaaagaagatagctattaattattttatcgcacatgatgattttcctatgggttatgaagaactaatgataagtcgttctaaacaagcagttacccaaggcttggaagagttaaggggagaatttatggaaagataccataaatattacagaaaaatggaaaggagttgtattttatgaatcaacatattatgccaatttttagagagcatagtaaattttatcaaaggtattcaaatgtaccagttcctgaaatgcttcgcttgcatggattcatagttgatgaaatgccaattgatgaagcagatattgtttatatggaagaatataaaaattctttacttaaaatggggattattattgatgaagtgccttttaagaaggaatttgttgcgca

SEQ ID NO: 413 - DNA, 2760 bp; double-stranded, linear
attgtaggagataatggtggcttggcacgggtctctgaatcgtttattttaggttcggtctcattaattttttggacattgactatcttaaccacgattaaatatgtagttattgctttaaatgctgataaccatggagaaggtkggattttctctctttatacattggttcgtaaaaaaagtaagtatttgattattcccgcaatgattggcggtgccgcttnactggctgatggcgkkttgaccccagctgtgacagtgacgacagcgatcgaaggcttacgggggattccagcattttttgaacgttttggcaatgaccaaacgattatagtggttattacgttgacgattattttaattcttttttctgttcaacgatttggaacagaattggtcgggaaagcttttgggccgattatgttcttgtggtttacttttttaggcatcattggtttaatgaattttagccaagattggacggttattcgtgcattaaatccatattatgctttgcaattactagtcagtccagaaaataaattaggtctatttattttagggaatattttcttggctacaactggtgctgaagctttatattctgatttagggcatgtaggaaaaatgaatatccgcattagctggccgtatattaagatttgtttgattcttaattatttagggcaagctgcgtggttgttaacggtcaaagaaaaccctgaaatgcaggcattagctgaaattaacccatttttccaaatgattccacgaggtattctcgtatttggcgttgtttttgcaacaatcgccgcagtgattgcttcgcaagcgttaatatcaggttcgtatactttagtttctgaagcgattaaattgaagttattaccaagacttaaaattatttatcctgggagcaatatcggtcaaatgtatattccagcggtaaatttaattttgtggttagcttgttcagcaatcgtgctggcttttagaacatcgacacacatggaagctgcgtatggtctatcgattacgattacgatgttaatgacaaccattttattgttgttttatcttttggataaaattccagcttggtctgcgtatctaatttccttgttctttgctgccattgaagttgtctttttcttttcaagtgctgcgantttttccatggtggatatgttgctgtgggaatggcagtcttcttgttatgcatcatgattatttgggaacgcggcaacgagattaaggaagcgacggcggaacaagtgtcgttgaaaaaatatgtaccacaacttaaagctttgaaagaagatacatctgtacctatgtatcaaaccaacgtggtctttttaacctccgatcgagtggatggcgaaattaatcgtaatattatttattcgattttggacaaacagccaaaacgagcgaacgtttattggtttgttaatgttcaggtaacagatgaaccctttactcaagagtattctgttgacatgctaggaactgattttattgtgcaagttcagctatatttaggcttccatatttctcaagaagtgaatgtatatttaagacaaattgttcatgacttgatgaaaacaggccgcttgccaaaacagccacaacgttattcattaacgccaggaagagaagttggcgatttccaatttgtattaattcaagaagaattatctaacgtttctgaactgaaaaaatgggatcgacaaattatgcaggcaaaattagctatcaaaaacttaactacctctcctgaaagttggtttggcttggaatacagtgaagtcaaatatgaatccgttcctttaatcattggcccacaacggaaaacgcacttagtcgaacgaaagaatcgttcataaatagaagaaatttaactaaaagattgagcctaagtccttgagatacatggctcaatcttttttgtagaatcagagtaaatactgtaattccacaaagaattcatttaaaagcgtttggtctttaaaggaattcatccgcttaaagatggccagtaagacttctttttgaggttcagttaattgatctacttttaacaaaggaagaaaagcgataatcagagaataatccaattctggattttgagaatgtgtaaataattcatggagttctgacaaaataaacggatgataataagattggtcagactgttcttctgcagttgttggttcataaatagaaatactctcttgggaatgagagggggcttctactgttaaaggaaaagcataaaaggactgctgtaacttttgcgcttgaatcataatttttaaggaatcgtgataggatagctgttcttcagataaacgtcccatcaactgagtaaaaaaaggtggttttagcagttgtttattttgaaaattttcttttaatagctggcgcacaaatcgatcgaaatcaccataaagtagccaatctactgttgtgtcacaggctttagcgattttttttaagtatcgtttattgggtaaattcaaacctagttcccmgttactaatkgkacytccactrgataamccaattttatkggctaaataacgtaaagtgtacttcttcttttttcgagcttcacgcatgcgtgccccgacttgctttgtagtaattttcattgaaacactccttttgtaataaatatgaggataaggtgttcttaaaatatacatacgcaaaattcggctctttttnttctaaacnaaaaaaagtnatttattc

SEQ ID NO: 414 - DNA, 1142 bp; double-stranded, linear
ttcggctacccctaattttatcggcttagatagaaatagtgaattaagaggttagcagacaacaaaataagaaccgactgkcataggacgggaatcctagaggacagttaaacaattctgatacagcatgaactatacttcggttctcgtttgttgcaacattagttacaacgtatagtataacaatttttaatgtaaaattctaggcttttttaaactcctttattggcctaggtaaagttttttacaatgaattgttttaattagttgtataaatgttgggacagcggggaatgtatacagttcatgtatatgttccccgcttttttgttgtctgttaacttgttgaaaaaataaaaaaaccaagtagcaagcattctcattttctaaaaatggcccgcttgtggaataattcaatgctttcacgcattgtttgtactggaactactcgtaagagccgtgcaaacaacgtgttgcatggctctttttctacttggttcagaaagtaggtgaatcaatgattgaactgaaagcaacagatttgcaccgtattacgtgtcaactgaccttgtttaatcgacaaaggtttaaattgtataacggcacaacagaacgtatcgtatatgatttttcaggaagaaatctgttgatcaatcctgtgagttttgaaacggagcaagacatggaacgtttctttcgacaagtaaaactgatttattttgatggaaaagtggtcggttatcgtggctgctcggaacttccgttaaaacttgaatgtagagcgttcaaaaaaatggntaacgacaaaagatgttacttaatgcaccgttcaactataaggtttttgaagaaaatgaatttagggaatggtgcaagaaaatgagaagctataagtagtgaatttggttttttatacttggtctttttgtttgttagttttaactaacatgtgcaatttaccaatagctaggttagctatcgaaaaaggatgcagaaaagcacacggacacgaaggtgcaaactggctacacgtcaacttttttgcagatttgggagatcctaaaaaatgaataccacaggncttatccagtccatcagcgtgccttaaaagtctaggnaagggnaaccancctaagagtccg

SEQ ID NO: 415 - DNA, 6285 bp; double-stranded, linear
ctttagttcaggctgggccttttgaaaatttagatgaaggatttgatgtctacgccactcaagcctttaatgcgccagatggtcgtgcacttgcggtcagttggattgggttgccagaaatcacttacccaagtgatgtggagggttgggcaaatggcttaagtctggttaaagaactcacaattcacaacgggaaactatttcaatatccagtttctgaaacagaaatgcttcgtcaatccgctactactttatcaaatggctgccatttcttatctactgcttcttttgaattagaagtggatattcccaaaaatgagattgcttttattcggcttttagcgaacgaaacgggttcaaaaggacttttaattacaattgrtacgattcatggtaaaataacccttgatcgaacatttgctggccaatcttttgctgaaaagtatggcacaattcgtgaaactaaaattaggaaaaataagtcagttcagttaactatttttgttgattgctctgttgcagaaatctatgtaaataaaggtgaaaaaacgatgactggtcgcttctttccagataaagcgcaacagtatcttcatctatccaagacggcaaaagcttgtttttatgagctggaaaatacgaataattaggaatgatggtgaattttgatggtggttaaattaacggatgtagcaaagcttgctggggtgagcccgacaacggtaagccgcgtgattaataattatggttatcttagtcaaaaaacaattgataaagttcatcaagcgatggaagaattaaattatcaacctaatggattagccagaagcctccaaggaaaaagtacgcagctgattggtttagtcttcccttctgttagtcatccattttttggtgaattaattgaaacactggaaagaaagctctttgttcaaggatataaagtgattttatgtgatagtgaaaaagatccagaaaaagagcgcgcctatttacgaatgctcgctgcaaataaagtggacggtgtaatcactggtagccataacttagctattaacgaatatgaaaatgtttcactacctattgtttcctttgaccgtttcttggcacctggcattccaattgtctcttcgcaaaactttcaagggggccaaaaagccactgaagccttatttgcaagtggtgcacaaaagattgcaattattactggtgctaataacacaggcgcacctagcgattatcgattggctggttataaacaaacaatggaaaaatatggcgcagaaaaaacgattctacaaattgataatgggacctcaacaacattaaaaaatctagaaatcgaacgtttgcttcaaaataaaactgtagacggcatcttttgtacagatgatttgacagcaattacagttatgaatattgctcaaaaattgaagatatccattcctgaagaattaaaagtaattggttatgatgggacaaaattaatcaaaagaattgccccacaactatcaaccattgtgcagccaatcgacgagatgtgtgacgttatgattgacttactgcttcgtagaatgaaggatcctgatgttgcacttgaggaaaattatcctattccgattcagctatcattgtctgaatcctgttaaaaaagacaccttttcaggtgtctttttttattcttaattcctcatttgcctattttcccttaattccaaagcacagagattaaataatacaacaacatgatccctacaaatacaccgagcattagtaaaacataccaccaatttttggcgctataggtttcatttttatttttttcggttcgtttcccggcagcccatttccataaatcgtaattattcatctctctcaccacctttaatgggtttattaacttaagcctaacacggaatgagagaacttgaaaacaaaaggatcacccgcttatgcaatggatgatccttttttgggcactattcttctgataacccattatttttaataactgattggtaccaataaaaactatcttttttaatgcgtcgtaaatcttttaactcatggtcttcacgattaacgtaaataaaaccgtagcgttttttgaatccttgatgggaacttaaaatatccatgaccgaccaagggcaatagccaaacaactcaacaccgtcagaaatagccgcatgacaagcagcaatatgatcatgcaaatacgcaattcgataatcatcatgaatttttccgtcctctgttaggtgatctggtgtgcctaagccgttttctgtaatgattaacggcaaacggtattgacgataataatcatttaaaactaaacgtagaccagttggatcaatttgggcaccatacttagaggtttttaaatgttgatttttttcgattttaaaataaccgtatagatcaaaatcaatgtccttttctttcgtacccaatgggtgttgctcatctgtcggtaaatagctagcgactaacgtccgataataattaagagcgataaaatctggtttagcggctttcaaaattgcttgatcttctggctgtgtttcgggataaatgccgcatttggttaaatactcttgatagtaaccagggtattcgccaaaacaatacatttctagagcgtaattcgttttaaagttatcattcatacgagctgcccaaacatcttcaggcttattagaactaggataagtcatcgttgaggaaacagagggaccgacttttcccccagcgaccaattggtgacaatcattcgtcgctaacgcatgggcaacaaacatatggtaatccatttgtgcacgaattttttcaacattttctggtgcaacatcgtacatattcattcgttcatcaacacgaatcattaagttttgttcgttcgtaacttgccaatttttgactcgatcaccaaatgcttgataacagacttgcgcatagcgttgaaatgcggaaacgcagcgacgatccgcccaaccattgtatttttccaccaacgcaaaaggtaaatcaaaatgataaagtgtgacaaacggcaaaatatcgttttctaaaagtgtatcaatgacagcattataaaaatcgatgccggcttgattgatttcgccatcacctgttggaatgattcgtgcccatgaaagagaaaaacgataggtttttaagcctaattctttcattaacgcaatgtcctctttgaaacgatggtaaaaatcgctggcgactttcgtatctgcttgtacagctgactttttaaaagaattgtaatcagcgactgttaggcctttgccgtcctcattccaagcgccctcaatttgaaaagcggaggaagaagcgccccataaaaaatcgttcttaaattgtttaaccattagttttgctcctttacttgcatgaaaaataaatttgtttgtggtgtaatctctgtttgtttggttgtctcaattacagccatttccgcagtatttgttacgatgactaagacggttggatcataaccagcagcttggatgatttgtttatcaaaagagagcagcttttgtcctagcctgactctttctcctacttttacgaacgtttcaaatgcccgcccttttaattcgacggtattgattccaatgtgaaggaggatttcagcaccattgtctaactttaagccaattgcatgatgagttggatataaagccgtcacttgcccatttcctggtgaaacaatttgttcctctgtcggataaatagctagcgtttttcccatttgttgagaagcaaagacttcatcgttgatttggtctaaagatacgagttgtccttgaacaggtgcttgaatccgttgtttttctttgactgtccctgcctctgtcttgaagctgggttcttgacgtgactcgtcaagcggtaaatcattaaagcctagaaaaatcgttaatagaaatgcaccaaaaaagcaataccacaacctaataaataacaaataaaggctttggttcctgcttctgcgtaaactgggatggtcaagagtccttggttagcgaaggctgtcccgtaggaaccgccccagcccattaaggccccgcctgctgctccgctagccaccgcataaatcatcggtttttttagccgcaagtttgcaccataaatggctggttctgtgataccaaataatgcagtcactgttgcagaggcagcaacagctttcaagtctttattttttgtgcggacaaacacgccaaatgcggcgcccgcttgagaaaagtttgctgcaccagcaaacgctagcaaattttgccgtcctgttcgagcgacatcattaatcccaattggcacaagcccacggtgagccccaaaaatgactaagacacaccaaattcccccgataaaaccgcctaacaagatgggactcaaattcattatataataatacaaccaattcacgccgtcacctaaataaatccctatcggtccaaataataataaagtggctggaatcattaaaagtaatgacagcgtaggaaccataataatttttagaacttctggaatgactttttccaaaaagcgttgcacataagctaacataaaaattgcaagaataataggaattactgtggaaacataattggctttggtcacatgtaatccaaacaaggtaaccgctgattcttcagtcattaatgaaacgatggttggataacataaggtggcaccaattaccatggcgatatattcgtttgttttgaaaaccttagcagctgaataacctaaaataactggcataaaataaaaaagtgcatcggaagcggcgcttaaaataatatacgtattcaaaggttttaaatcgacctggtaaaaattgtttgcgaccatcacagcaatagctagaattccttttaacatgcctgaagcggcaattgctggtacgacaggtgtgaaaatcgccgcaacagtatttaaaattcgattacctaatgaatttttttcttttgtagatgttttggtcgtaagttgctgagccaacaaaggttctagagcattatagacatgcgcgactttattgcctaaaaccacttgatactgcccgccgctttcaacaacagaaatgacaccttctgtttgtagtaaggcttctttgttcgcttgtttcgtatctttcaatacgaaacgcaatcgtgtataacaatgtgtgacatccacgatattgtctttgccacctacgtctttcaaaatttcttttgctattgcttggtagtccatggtgaccactccttatctataaaataacagctcaataaaaaagaccaaatcacacatgcacgtttcagcaaacacactcaatatttgctcgtcgtgaatgtccctttgatctgatctacgtaataactatgtttctcacgatagaatagctgattgaatttatttttaatttaccattatttagagggattatcaatgaattaggtagagcaactcagtgttttgttactaaaatcagcagtgaaaatagtagtttactacattcactgctgatttatttgattacaagactggggacaacaagcgtgaaaagttttgcttgaatcgtagccagtacccttgttttttaattatctcgtcggttagtaagacacttttttctatatcttcttcaaagacttgcgctaacatccacgcaatgtcgggattgtaaataaacgtacttacctcaaaattcaatgaataactgcgaatatcttggtttgttgtcccaaccatagctaattcatcatcaatcaccattgtttttgcatgaataaacccactatcataaatataaattttaatgccgcgtttgtgtaagtaatttgcgtaatattgtgtcgcgcggtaaataaagggatggtcaggcatacaaggaatcataattcgcacgtcgacacctgaacgaaccgccactaacaacgcattaatcatactatcatcagggattaaatacggtgtttgaatccagacactcttttctgcagagaaaatcatccgaacaaacccgcttttcaaaatttcttcttctgaatcaggaccatctgaaacaacttgtaaggacaaatgctccacttcatgatcttctggtaatttaaaatatttttcatgatacgtcatacgttcttcaggatatttgactgaagcattccaatccatgataaatatctcttgcaatgaaaatacggccgtcccgaccaaacgaatatgggtatctcgccagtaaccaaatttttcggtgacattcaaatattg

SEQ ID NO: 416 - DNA, 787 bp; double-stranded, linear
aaattattngantttcttacccgccattatccataatcctttagttctctcttggtttcgggattcgaagtaggcgtatcacaactactaaaatggttagtatggaatggaggactgcagcattatttacatgttttactttagctaatcctttaacaattttaacttcttttataatggctccagttggcgcactaagtccsgtattatcmgtaggaatgttttcagccctaatggaagctagtataaaaaaacctacggtcaatgattttatgaatgcacaagacgatatttcatcaattaaatcgatttacaaaaatagattgttaaaggtgggtttaatctttgtgttagctagtgcaggtggggcaataggtaatattatcgggggaatagaattatttaagaatttaatttaattaataaactaggaggaatttaatttatgaagaagagaacgatgctttcatttttttgtgtaagtgtgctagttttgattttaggagcttgtaatggaaaagaaggaacaaaaaataactctaaatcaaaagaagttgagcaagtagctactttttcagctatgacacctgttcaaagtttagacccagcaacagcagtggatcaaacaagtattacattgttggccaacgtaatggaagggttgtaccgattagatgaaaaaaatcmrccmcmaccmgcmattgcmgcyggggcamccaaaattccmataatggtaaaacatatacaattgtgattcgagacggtgcaanatgggccgatggtacag

SEQ ID NO: 417 - DNA, 1092 bp; double-stranded, linear
ctacgttaaatgaatggaaaaaacgatttccggacattaaggacaccatanaaagaggtaaagaagttgtagaccgccaagtggaaaatgcattgtttaaamgtgcggtgggttacgartacactgraattactaaagagttaactgactcggcatgcaaagtaactaaacgagtaacaaaacaagtggcccctaacccaacatctgctattttctggttgaaaaatagaaaaccagatgagtggagagataagaaagaaactcaagtttctggtgaaatgtctgttaacaatccttttgctggtttgtctgaaaaagaattaagaaagttagctgaaagtgatgaataagattgttttgggtgcgaagttagaattatcccgtcgttatttttgggaatattgcaaattaacggcatctgacttttataagcaagacagagagtacttaaaagagttatgtgatgacttgcaagaattcatttatgatagcgataatgacgttctagttatcaacgaaccgccgagacacgggaaatcgagaactgctggtaaattcgtagaatggttgttagggaatgacactcgaaaaaaaataatgacgggatcatataacgaaacgttatctacaacattttctaaaagcgtaaggaatactattcaagaaataaaagctgataaaaacagagttgtattttcagatgtattccctggtgtagagataaagtctggtgatggagccatgaacttatggagtttgactggcggatataacaattatctagcaacgtcaccaactggcacagctacagggtttggtgcagacattattatcattgatgatttaattaaaaatgctgaagaagcaaataacgctatggtattagagaaacactgggagtggtttgttaatacgatgctatctcgttaggaaccnggcggcaaaatcatcatcattatgaccagatgggattcnaatgatttagccngtaaaagcttaaaaggattgccgcaatccaggctataaagtaaaaccttatttagcctggaaggcatattaccgaggaaaccggccaccangccttgtggagtc

SEQ ID NO: 418 - DNA, 3709 bp; double-stranded, linear
gttttcgcaatgtccatgtttccccaagtgtcataccaaatataggtatgcgcacgtttaccttgggcaatagcacttgctacttgcgttttatatgtgtattgttcataaataccgctagcattgtagccgccaatctgagcaatggcgaatttatcatgtgcataaccaaaacgaccctgttcgccttgataaatcgcccagtcaacgccttggtcaccttttgcagcaaatacatttaaaggcataaaaaatagagcgacaagcgctcctactaaaattttctttttcatttttacttctccttgtcttttaaattatatgctgacacacctgttactactcctaaaaaagttgcaatggcattgatagttaaaacagccatatctgtttgttgccaaccgtaggctttacctagcgtggcaatcaaaacagaacttgcaggaagcacagtaagcactccccacttgatgattttgtaatacttgtctggtaatatcatttctaaattcctcctaagtatttcgtgattaaatagacagcaacagaaaccccaattcctgcaattgttcgccacgtccacttttgattctcttttatttccgcaatatcgccttcattgtttttggccattgagagcgctatgtctgctttctctcttaattgttcatgattatccaactttgtttcaatccgtgccaaacgatcgacgatttcaattaaaggatcatctttcaagttatcgtctccatccctctaacaaaagaaccgcctagcttttgctaaacggttcacctgtcattttagtaaattcatcttctgtaatacaactaggcacaaattctgcaacctgctctggagtaaatagtccccaatcatacatcagtttaatgtcatcatatgaatacattattttgcacctccgatttgttctttaatagcatcaatttctcttgtattttgaagagaagtaagcatcgtcttagaattgatttgtgcaagtgattctgctttagcagttagcttttcatttgcttgttttaactcactatttgaaacttctaagccattagcaagattttctaacaaattcaatttttttgtataatcctgtgtcactgcttcttcccatttttgttctgaaaagttaaagaattgggattgttcattcactaaattttctagtggtttctcctctacaaatggcaaggctacaacataatcatcttgaacttcgaaaatttgaaatcctactgggtagagcactttatatatttttttcattttattatccactcctatttacgacgcataacgccgatttctctaaaaacaatttttttatttgcttcatttaatgtgtttgcagtatctcctgtaatcactaaagatgtaccagatttagaaatagatatttttttatacgctattgttgggtctgttgaagcagaacctacccatgcaactgctggtaattcgtattttaatttcgtaatattcggagtaactggtattgagtgaacaataccgccaccgttatcgttgtaacgcgagaatatcaaaacaatttcatccacattgctgctatttgaaattgttactgattgagattctgtcaaataagctccagttccatcccagtagtctttcaccacctcataggtcggttttgcattaaccgatacagatttaccaccgatttgaatcccatcttgaaaattctttgtccctaaaacagtctcatttccaacggcctttactaattttccttccacgccgtcaatagcatctgcatgtgttttcatatactttacaacaccattttcttttagctgaacgatatctgccattacgcttcacctaccttttcaaatgtaaaaactggtaatgcatccaattttgctttatccgttttagacattaaaccgtctttttcagaagtggcattgctaggaagcgttggaataacagttgtgtctggcagtgcttttacatcagaagcagttaaaataacttcacctgtatgaccatttacagacgagacagtgcctgcttcagcaccactaatttttccatcaacaaattcatttaatccaacaacgccagctgtactagtttgtacatcaatagctacgccgtcttttttcactacatataaatcaggcatttatttcttcatctccttttactttttcaaactcaacaccagaaccacctagttttccatcttcataatcggctatgatttttaacattttgtcatactcctgtttcgaaatcataatcccatcaataggtaaatctaggtctgcacgcgtaataatgactgcgcctgtatgtccatttactgaagatacttttgaattaccagccattatctctgttaatccaaggattgccgatacgtgtgtcataggaaaaaactgacgtttaatcccattttcatcagtttccatcattcttttagcatcaaccattgtctacaccttcaatcgtaaaaacattttgttttgaatcatcaactgtcgctataattaacgccccttcttcaattggatgattaactgttcccaatacttcaacttcatgattcttagaaaatgaatcatcctctaaaatttctaacgtgtttacattaccgtatttgatggtgtatagccgttcctctaaccgatgatacaaatagttcatatcagccaataaacgctcagaaagtgaattatgacgtactccttgtatgtctacacgtgcatccattagctcggctaacattgttccgcctggatcaatagtttttaaaatatctttgattgattcgaaccattttagataatctgtttcttggccgttccgccaagcttcaaaagtatcttgttgatttttacgccatttttcaaactcttcttttctagcgttcatccacgctgtgaaatcgcccttgttttcattaataaaagcagtcatatcagctatcaaatcctcgattgactgccaatatgaccccatttcaccttctgttttagaagcagcattcacaacaaagtaagaaaagttctgcgttgagccaattagattgtcgcctttatgaatactgaagtatgcttcctgtctatgcaatgactgcatagaatattcatcaaaggtatactggataatcccttttttggcattcacaatttttgctgctcgttgaatcggatatttattatcaataactgattcaaaaaaaacttcgcaacctgttaaatcaagtggcaaagcattttcaactagtatggcttctaagacttctgtgtttcgatttccttgtcgtacattctgaatcccaatgtaattgtaaggttcagttgtacttagcgttgcttgccatttaaccattgaaaaatcctcctctcgttattttggtggaataacaatcgattgaatagaattagcaaaatataatcggtcatattttgcgacaatttgtccttgctcggcattctgttctatcgtttggatacgtccgttatttaagccgtaaatcacgcccgtgtgaccatatgttgggtctactgtccaacctggttccccattggncactcgtctaatattgacgatgcccctacnactaaanctgatacgtggattggatactcgccaactacgnatccaatcaaagctcaccatattgcagcagagatgatcaccatacagtgaaagcataatg

SEQ ID NO: 419 - DNA, 1649 bp; double-stranded, linear
aaaataaattccctgtaggttcatctgcaaaaataatttgcggattattaactaaagcacgcgctatacatacccgttgtttttggccaccagataaattattcgctttattttgaactttatcttccaaaccgactgcttttaacgcatctaaagccatctttttcctcttgctaccggaaatcccaccaatttttaatggtaaaagaacattatttaaaactgtatccttggcattcataaagaattgttgaaaaacaaaaccaaattcttcatttctcgttttattcagcactttctttctaatactagtaacatttttaccatttaaataaatatctcctgaagttggttgatctaacaatgccaaaatgtgcataaatgttgatttcccagagccacttttaccaattatggccacagattcacctttttcaacttttaaatcaacaccttttaacgcgtcaaattttgtttcgttctttccataactttttttgatattttttgcttcaattaccgccatgttacccctccatttttcattctttgtcgtttacttatttacaaagttttttactcttttcatactcctttcttctctttctattttgacggaagccctttcctttgtcatggtacttccgatgtatctctcaattaaaacaataagaacatgttccaaattcacctcattgaacatgttcttattaattagttatgcatttacgcgtttaatttcacgatgtttattcaataaataggccaagccaagattaataccaacaaagcaactgattgtcagaagaagtggtaggacagtaaaaccagtggattgataaccaaccattgtttgcaagatgtggagcattctcaggcgcattggtgccccccctaattgtgcaatcgtgcccagtaaaataggaatcattaataacagcaataaaacaatgagtttttttacgccatctatccgatcattaaagacacctgctaacaagccaagtgagccactaagcattagtaagataaaaaagagcaaccacgacatgaaaaagtttccttgtgcatagacatcaattaatttcattgataattgaaaatgagaaatgaaattgccgctaaatactttaatcagtacaagtacagccaaggrtccaaccaaagataraatwgcattacttacmaaattcmccaaaaaaattgtccagcgggaaagcccgttttgaataaacagtttaaaatctgtgttcatccccaaaaatgatagtatccccataaaaaccagacaaggaattactgcatcagagctgacagtgttcacgtcgttagaaaagagcaacccaataagaggaaaaagaatgccgaacaaagcmtaaaagccaaaataaattgctaaggracggrcttgataaataacacggtaccgcaaagctgttttaaatttcattttacttttccytctttctattggttaatkgtmcaaaatatgtttgtaaatttagcggcgcaatttgaacctctgctttttcagtcggcaagtcgccgtacacgtaagccgtaactgctccacctaaagtgtccatgcctaagatttccaatgactgagtatagcgctctactngttctttcggcccngaaacaatgcg

SEQ ID NO: 420 - DNA, 4114 bp; double-stranded, linear
agggtagcacagaaaagagggaggtatgacaatggaacatcatcaactaaaagcatttccgcaagattttttatggggctctgcttcggcagcttatcaagtggaaggtgcttggaatgaagacggcaaaggcgcatctgtttggggatgaatttgttcggctaccagnaaaaacgttcaaagagacaactggcgatttagccgtcgatcattatcatcgtttcaaagaagatgtggctttaatgaaacaacaaggtttaaaagcatatcgtttctcgattgcatggacacgaattttacctgaagggcgtggtcgagtaaatcaagcgggactgaaattttattcagatttaattgatgagttattagcggcaggaattgaaccaatggtaactttgtatcattgggatttgccagctgttttgcaaaaagaatatggtggctgggaatcaagaaaaattattgatgattttgtggcctatgcgaaaattttatttgacgctttccgtggcaaagttcgctattggattagtttaaatgaacaaaatgtgtttacttcgttaggttatcaattagccgtgcatcctcccggcgtaacagataataaacggatgtatgaggccaatcatattgctaatttagccaatgcagcagtgattaatgcgtttcatgaattagaaatgcctggcaaaattggccctagctttgcttatacgcctgtttatgccgttgatgcgcatcctgccaatgttttggcggcagaaaatgcagaagatttgttgtcgcatttttggttagatgtctatctttggggagaatacccaattgccgcattaaattacttacaggagcaaggtgtggccccaacgataaaagagggcgatttagcgttactacgttcagccaaacctgattttctaggtattaattattatcggacggatacggttgctgctaatccattagatggcgtcggaatagggaagatgaatacaacgggtgaaaagggttctgaaacggaatctggggtaccgggtttatttaaaaaagtaaataatccatatgttgaacggacgaactgggattgggccattgacccgcaaggtttgagaattgccttacgacgattagctagtcgctatcaagtccctattttaattactgaaaatgggttaggcgaatatgataccttaacagaagataaacaaattcatgatacgtatcgcattgattatttgcgagccatatccaagcgattcaagaggcgattacggatggtgtttcagttattggttattgtacatggagttacaccgatttactgtcgtggctcaacggctatcaaaagcgttatggttttgtctatgtggatcaagatgaaacacaaaaaggttccttagaaagaatcccgaaagacagttattattggtatcaaaaagtcattgaaacaaatggacttatctaattataagaaaagagtgtggaaaatatgacagtaaaaatggggtttattggatttggtaaaagtgccaaccgctaccatttaccttacgtaatgattcgagaaacactagaagtgaaaacgattttcgatttacatgttaatgaaaaagcagcagcgccctttaaagaaaaaggcgtaaattttaccgctgaccttaatgaattattgacggatccagaaattgaattgatcacaatctgtacacctgcgcatacacattatgatttagccaaacaagccattttagctggtaaatcagtgattgtggaaaaaccattttgtgatacgttagaacatgcagaggaattatttgctttagggcaagaaaaaggggtagtagtgatgccttatcaaaatcgacgtttcgacggcgattacctagcgatgaagcaagtagtagagcaaggctttttaggagaaatcaatgaagtggaaacacatattgattattatcgaccaggaagtatcacggaacaaggacctaaagaaaatggttcgttttacggactaggcattcatttaatggatcgcatgattgctcttttcgggcgtccagatcaagtcacttatgatattcgtaataatgaagtgagcgaggcagtcgataattattttgacgttgatttacattatggttcaaaattaaaagtaaaagttaaaacgaatcattctgtcgctagtccgtatccacgttttattgttcatggcagcaatggctcgttcatcaaatatggtgaagatcaacaagaaaatgatttaaaagccggaatcatgccagatgcaccaggctttggagaagattcaccaatgtattatggagaagtgacctaccgtaatggcaatggcgactggattaaaaaacaaattaaaacgcctgtaggtgattacggtcgttattatgatgccgtttatgaaacgttgaaaaatggtgcaccgcaactagtaactaaagagcaagcattaactaacatcgaaattttagaagcaggttttcttaacccaagtccaagtgtttatcatttgaaagaaaactaaagcgtatttaaatgacttgaaaagsgcctgccctacagtccagacaactgtggggcaggcgcttttatttataaagaattgtgaattttaatataagaaacgtatattgttagtaaaaataaaaaaaggaaagacatcttagtagcactacttccccaagaattgctactaaaatgtcttttgtgatgctcgctcaattgaagagccttaaataggatatcgaatatccagtataaatgcaagtaaactactttatagttaatattagtatacttcataaaataatttttcaaagagaaaaaggcttgttatgagaaaaaattaatttttaactcgttttttctaagcaagattcgggtgaaaaagacaataattactgaagctgaatggtaattaaagaggttctttgctaaaataggaaagacaagaaagtttggttaacgaaagaaccaaatcagaaaggaggacaaccagtggagagttggctttttttactactgattgccttgattgcgtttgttgcaaaaaatcaaagtttattaattgcgtcagttgttgtgcttgctttaaaagctttaccaaatagtgcgaaaatcatgtcgtggttgtcagataaaggcattaatttaggcgtcacaattatttcaattaccattttagtcccgattgctacaggacaaattggcttaaaagatttaatccaatcattcaaaacaccgatgggatggctggggatactttgtggaattctggtggctgttttatcctcaaaaggagtaggtttaattaatcaatcgcctgagattacggtggccttagtttttggaacgattcttggcgtcgtttttttaaaaggaattgcagctggtccgattattgcatcggggatgatgtacgtaatcattactacctttcaagcctttcaacactaaaaaagcaaacaaaacgcgtaaacgttttgtttgcttttttagtgttgataaatgtccacattactatctaatatgccactttcattttttaaagtaatggttcccgcattcggatgaatcactagctgtaaatgccctgttaaaaacatttggtcatacgtcgaagtatagacgtgaaaagaatcattagcaattgtttcggtataaggcgcttctgcttgatcaacaggaacgataatgaaacgatcgccaatcatacaacaaccttctgcggaagaataaggattagagccgtcatttgctaccaacaagaaggtgttcgtttcagttaagaaaggggctaaacgttgttttacttcttcagaaatagtcagagacatttgcctcactcctttaaatagtatgtaaaaggaagagggtagcttgtcgctatgccgctcttcaaaggttttgttatttgcttgtttctttactgctttttttgaaaagagcaatagaaaaggcgacaactaagacaactgttgcagctaaaacaaatggattttttgttgctgatgtgaaccctaggactgttgaaccaatcgcacctacgtaagataaaataatcgctgcttyctttggkgttgaaagttctgtcaaagtg

SEQ ID NO: 421 - DNA, 2285 bp; double-stranded, linear
atgnaggccagatcccctccaaaaaaaatggtggccnnnttacattaccccgcggcatttgcctttgactatcagaactgaagaacttcaaggaattttagtcctgttgccgactcacccacggacattggaaatcgtaaacatcgctgtctcagaagaaagccgagggcggggcatcgggcaagaattattacattttgccattgattttgccaaaaaagaaaagtatgattccttggagattgggactgggagcacaggctttcaacagctatatctctaccaaaaagtcggttttcgaatgacacatattgaaccagatttttttatccatcattatgatgagcctattatagaaaacggcttgcctttaaaggatatggttcgcttacggttacatttaagttaaaaagaggtcgggacagaaccgtttagctccgagaaataagaagaaatttccgaaaattgctctttaatttttggagaatttcggcttatttccgaagagttggttctgttcccgccgtttatcagtttttgagcgtggagcaaaaatccaaagtgatttttgtcccacgctctttttaatgcccaagaattggtaacaactcatctagctgttgaatcgtataattgggttgaatggttggtgttgctggagcggaggtcggattgagccaaacagtttgaattttcgcttgttgacctccttgaatatctgaatgcaaagaatcgccaataatcattgttttttctcgactaaaattaggaatccgttcaaaaacaaaatcaaaatactctttcatcggtttttgataacccacttcttctgaaacaaaaatatctttaaaataaggcattaatttcgaatcttccaaccgacgatactgtgtttttgccactccgtttgtcacaatatataaatcataatggggtgctaatttttccaagatacgttgactattgccaagcaagtcatgtccttgacttaaatattctcggtagttttctcccattttaacgctatcaacttctcgattaaacgcgtcaaacaataaaccaaaccgtgtatcaaggagaacatcttttgttatttttccttcttcaaatgaacgccataatccttgattaattcggtggtatgttgactcgacttcagatgtaaatggtacattttcttcttcaaataaggcatgtagcgccttcttttcagccaatttaaaatctaacaatgtatcatcaacatcaaaaagcaatgttttcatttccgttcctcttctcttttcaaattactcggtaacgctttgcttgtttgttgtttttcaataaaaaaataaggcaatagcaattgtaactcttctcttgttaatgaacgataagcacctaaaggtaattgcggatctagccgcaacggccccatagtttggcgttttaaagcagtcacttttttccccacggataaaaacatttttttcacttggtgaaattttccttcttgaatagtcaggaaaacatgactctccgtttcagtcgctgcaagaacagttatttttgctggcttacattgaatgcctccttgcaaaacaatcccatctttaaatttagcacaatcttctgcagagaccaaaccattgactttcacttcataacatttcgctacttctttatttggccgaattaattgataccctaattgtccattatctgttaatagaagtaacccttccgtatcgccatcgagtctgcccactggataaagaccagggcgtctgtcttgtggcgcaatcaaatcaataactgtttttttagatgcatctgagacagcgctaaccacaccttttggcttattcaacatatagtacacatgggtcttatgcgaaattaattgtccttttactttaatcatttgtaattgcgcatcgacattttggctttcatttaaagtcacgatgccatccacagtgacctgcttgcctttgattaatcgtttcaccgttttgcgtgatccaaactgaagttcttctagtaatttatctaatcgcattgttcagctccattctggtataagtatagtggaatccgttaaagatgaaaagtggaaaaaggtaattccttgacgtataaaaatataagtgttacggttaataagtaaagtaaataaaggttctcaaaaacagcgtaatgacctgggagagaacacgataacatgaaccattcccatgagtgttgcctggcaatatttgtggggattttgtatgtacatttcagcagacacgaaaaggtct

SEQ ID NO: 422 - DNA, 2974 bp; double-stranded, linear
atcggtcattgaaacggttgatcagratgatcaaacmacgctgtgcctaactcagattccatttttttcaatgctaaagaaagtgttggttgggtgacaaataaattgcgagcggccgccgataaactgcgggtattaacaatttcaatgaagtactttaaaagctgaatattcatcagaaactccctttctttttaaaagcgcttacacaaatgtgcttggataaaaaataacaaatagatcacttataatataacatatgttttgcctttttattgctataaaagtaagagatagagattttcttagcagatttttacctaaaaataaaaaattgaacggaggaaaagaaatgaagattattatcgcaggtgctggcgctatgggcagtcgctttggactaatgttacatcaagcaggaaatgatgttatttttgtcgatggttggccagaacatattgaagcaataagaaaaaacgggttagttgctgattttaatggcgaagtggtgaccgctaaaattcctatctatcctcagacagaagtagcaagcatcgattttacagcagacttagttatcctatttacaaaagcaatgcaactggcaggaatgcttgaagcattagaacatttccttaataaaaatacgaaagttttatgcttgttaaatggaattgggcacgaagatattatcaaaaaatacgtgccttacgaaaatattttattaggaaacacaatgtggaccgctgggttagaaggaccgggcaaagtaaaattatttggtaatggttcgattgatttacaaaatttaggggcgcaaagtgaacaagcagcagaagcagtcattaaggtattaaataacgctggcttaaatgctcgttattctgagaatattttatcatccatttataagaaggcctgtgtgaatggaacaatgaatggtttatgtactttgttggattgtaatatggcagactttggcgaaacagagcaagcagatcaaattgttcaacaaatagttaatgaatttttagcagtcgctgaagcggaacaagttacgttagataaacaagcagttcttcaacaaatccgctcgtgttataatcgagaaacaattggtttgcaccatccatcgatgtatcaggacttaataaccaatcatcgtttaaccgaaattgattatatcaatggagcaattgttcgcaaagggaaagtctatgggattgctacaccgtactgtcagtttttaacagagttaattcattgtaaagaaaatttacttcatgctaaataacaagtaaaaacagaaatactcttgagtcggtcttgagaagagcttgacctacttctttctatactttgccagtgtacaaggctgagacaaaatccaaagtgagtttggctcagcttttttgttttttaaagaacactgcagaaaataaatcaaatccgtgaaamatatgttaaactagagaaggtgttttttcgcaagantctacgcggaacacaggactcgttgaagaattgaatcaaagaaacaatgtgttaaagaagggatttgaacagattatgaccattcaatggtttcccggccatatggccaaagcaagaagagaagtttctgaaaaaatcaaatatgtcgatattgtatttgaactagttgatgcgcggttaccgctttcttcccgtaacccaatgatggaccaaattgtccaacaaaaaccacgattagtccttttaaataaaggggacttagcagataacgaccaaaataaaaaatggcaacattactttcaaaagaaagggtaccaaaccctagttatcaatgcccaacaaaataaaggaatcaataaaattgtgccagcagccaaggaagcgttaaaagaaaaattggctcgtgaacaggcgaaaggcttgaaaccgcgtgcgattcgcgccatgtgtattgggatccccaatgttggtaagtcaaccttaatgaatcgtttagtcggaaaaaaaattgcgcaaactgggaacaagccaggtgtgacaaaaggacaacaatggttacgctctggttcccaattggaattactggatacaccagggattctctggccaaaatttgaagatgaagaaattggaaaaaaattagctttaactggcgctataaaagatcaattattgcatctagatgatttggcgatttatggattagaattttttgcacgtttttatccgcaacgtttgacggaacgatatggtttaacagaggaagagctatttttacctgccccagaacagttgatgttaattagccaaaaacgtggttttagagatgattataatcgagccagcgaaatgattattttagaaattcgcagtggaaaattaggtacgtatactttggaccgctgggaagaactaggagacgaataacatggcaaaagagtcgattcaggcaatcaaagaagcgttgttaactgtcactgatgcaaccgatgaacgattagcaagctggcgagaagatgaacgttcaggagtgcaacaagcgatcaaacaatgggaacgtcgccagttagccaaagaaaaagagtggcaactttttaaagaaatgagtcaatttgaggaagcggcctataaaaaaggccatcgtttaattgcaggaattgatgaagtaggccgcggaccattagctggccctgttgtgacagctgcagttattttaccgaaagattgtcagttattaggcttaaatgattcaaaaaaactatctgctaaaaaacgggaaacgttatataaccagattcmagaacaggctgtcgctatcgggttaggtatcgctgatcmaggagtcattgatcmattaatatttatccagccacttaaccagcgatggaatgggcattgacgatttagctttttacccngattatttattaattgatgccatgcngttagcgttcccccaccncagaagtttgattaaggg

SEQ ID NO: 423 - DNA, 3078 bp; double-stranded, linear
gccctgtttgacgctctataganctttggctctcttgtnacgtgtccataaaacctccttggtgtgaaaagagccgcagctattccgtctgcggctctakgtaagtttacatcagcccttaagcggtaggccagtttgtgtccgccccgctgctggctgttgtacttttccagaatgacgcgggcaaagcgcagggcggctttattggtggagaagtccatcttgccgcgccggatgatttcttccgggtcaaccgctgacagccgcttaatgaaaatgcggtcgttcagttcggtttcataggttttcagaaacagcgccatgccggagagcatcgaagcacggagggaaatggatgcgccgtgccaggtgctgtctaagagtaccagcaggcgggaaaaagctgtgccgccaagcagacggtaggcgttgatgatggcgcgggtagaaaggatttcgtaagcgtcgccgctctttttatccagtatccaaacaaagcccgcagcttccactagccgcttgatttccagaacctccgcatccgtgccggactccagcagggcttttgtggcgtgggacagacgaagccgccctttggactgatccagcttaaaatacatctcggcttcctgctcataggtcatgccggtgtaaatcaggcaggggacggtcacgttgccgccgtctgccattttccgcattgnggcgatccggtgctggccgtccaccacattaaactttccgtcgcggaanctgaccaccagcggggtcagggcggtcgtcccatttggcaatcagccggtcaacgtcctccggctccacgggccgctggtagggcaggccggaagtaagctggttgctggataagtcgcgggggacgccggggttggcgtactggatttctgttaaaagggtttgttgatccgtccgctcgttacctggcggacggcgtttttttcgattgctcatgtcgttattgtcctttccatttgatttaataattcctccatcgcagtagatatgctttcaaagcgctgccggacaaattcaaactgtaccttggaaatgcgcgggaacacgatagtacagaacgggtcgtgataccatgcgaacccttgtgaaaggtctgcacaaagccgtcgatgtctgccagaagcgtgtccggcgtgtagctgcaatccttatccgggtttttcaggtcggctatggattcctccaaagtgtcatagtgctgatcgcycwgcgtatagggaacggagggctgcgagggaagttttgtaatcggctctgaggtctgcccttgttcctgcaccggttccgtttgttctggtttctgtgtcagtttggactgttctggtttctgcgtttgctcagcctgctccgggattggttcgggctgtttcggttccggcattggcttggggtactttggctcctgccttggttccgcctgtttcagtttcggtgctggtttggattgttccagtttccgcgccggtttgggaagtcccggaggttctgccggttgaaactcgtctgcggacttgattttaccagccgccaactgtgcggcggcgtgttcctgctgttccggctccatgcgggacagcttcagcaagtcctttttcttgattttgcggtcggaaccctgaatgacttcctgcgctttkggggttatatccctggcaatctggatatttycttccaccgaacgggcggaaatgcccagcttttttgctgtgtcccgtgtaaaggactttgacgtggacgcgccgcgctcgctcacgttgttgccctgggcgcggttcattgcgtttgcctgcgacacgccgcaccttgtttccggatgcaggatttcatagatttctttccgccgcatcagcagctttccaaactccaccgtttccagatcggtgcgtacaaagttttcgtcaatctcagcaagttccgcctgcaagccctccaatgtgctgatatggcactcgatttccgaccagccaagcagctttgccgcttccagccggtgcagtccggcaatcagggtatagtcccggtcaacggtgatcggatttagcagccctaccgccgaaatactgtccgccagttcgcgcacggcttccggcagggcttcccgccgcccggaattgacctggattgcgtcaatgttgatctgcattttcatcacctctttcggccctggccgccttatttgttttctcctgccggatgaaacacgttgcgccgcaggaatactacggcgtaaggtcttgcatcccgcaggaaagggaaagcccgcgccggttttgttttgcgccctcattctgtgaggaaatatgaccggcgtgggtttccgcttactgcatttcttaaaaatctgtgccgtattatcaggcggcatgaccgccttactgcccacccccggcacgggaatatgtaagcccaacatggcacgtcggcgcgataccaacagacggcggcggcaggtgacgaagctgcccataccaatccctcagtatctcccttttaccctgcgatacgggtttttgcggtgcatcccgcgtctgcggcgctgccatgcgccggacagccatgccggtatcgctcgtgcctttgatgtgatcggtttgacgggcagggacagaggtttacaccccctttcgctggccctgtccgcaggcagtcctggcgcggaatggctgatgcaggatgcaatcacttacatactggatatgaacaggcgcttgtcctgctgtttttcaaggtgctttggttcttacgctcagggagcaaattggtggagaatactgtccagtgtggcaaggtcatcaccggtaagttgtgcgctcaatttgacaagcagcgcagcctgccgtgccgtcaatttcctgcgataaaggtaaaacccatccgcaaccttgacgccgccgccataccgtccgcgtaccgtttcaatgggataggaacacataagcacggcaatatcctgacggatggtttctctggaaacttgaaattcaaatgccagattgcggtaggtatcgtgcygccttatgcacagcacttccagaatcgcttact

SEQ ID NO: 424 - DNA, 1935 bp; double-stranded, linear
aaatattacgatattcmaggggcttaaaagccccttatycatgcaagttattaagtcgctaaaggacaagtggtgtgggtattkgcacamcctgttagtttaycctatctcctaattctattcttagggattgtgttaactggcttgttttggaaagaagtaccattaccacaaattttaggaattaacttaaatttgttaatcatggtgttggtgccgaataaagttgctcgttggtattccgaaaaggaattcgaaggaaaaacaggctttggttttttaaaagatggttttgtctatgtgaaaaattatgtgttagatagtagaccaattgtagctttcgaacgagtaaaagaaatagaagagttttcatttaaacgttagtacaaaaagcgcactatatctatgaatataaaaaaacaaggagcgcatagcattagctccttattttttatgtctaaattatgaatttttatattttaaataaagcatgactgcacagactattattccgatgactaaaagtagcacagtaacaatactttcatttttatttatttttctttcaggtctatagctaggattaatttgttttgcgttaaaatcagtaattccaaagtctaaagtaggaagtaaaaacagtaataaaataatatatataattcccgctataaggaaaataggagcgttggtgaaaagtgaaataatggtacctatgattataggagttaaaatgtataaaaaggatttgataacattttcttttctcattttaattaccaaattttgttattcatgtttcccatatttcctaaaggaacacaataaccaccgctcatattttttccacctgtagaccaaccaccttttttaaaataaaaaccaccagggcaagagctaccaaattcagcttctctggcactagcttctgaactaaaaataaaaggtgttaccattgcgaaaatagttaaagctaaaaaaacttttttcttcatacactttccttctttccaattattatttaaaagctatattaaatatagctttattttataataactgaatgaaaaaaagttgtccaataatatatagaaatttctgaaaaatcatttttaatgttaattactaaaataaaatcaacaagaaaggaaaaaatatgcaattagaatatccattaacgaatcatatgaaaggaaatattgttttaacacaagaaaaaacagcgatagcttactatcgtgttcgttctgaaacggtaatgttgactgatgttgaaaaaaaattaaaaacgaaaagaaaagttgctcgtgcgttaaatcgcttaaaagcaaatgatggatttgaaattaaccttttgccagttaatgccgacattcgagggaaaatgggtgctatgcgttctttaattgattctaataattatgaagtaggcgtagataaattgatgaaaacggcaatggttttagaacaagaaatgggtatggtttacgaatatacgtggattattggtgtgcctttaatcaagaaagatctcgctgttgatttaaaagaaaccgttactaattcaattagcaacgtatcggaaaaatttgttaaagggctaggttttgatgtggaactagcagaatattgggaaaaggattaccgagaacaagaattagaagtttaccaaaatctatctgaattgttaattgaacgattaacagaagatgaattgtattattaccaagcgtaccaattcttgaaaaatattcctcatgagcgacaagatgttctttctagtcaaaatttagataatttaatggcmacaaaaattaaaccgttatttggcgggggattgcatttaaattgtgattatggcgaaagctatatatcctatcttccaatgggagatgtaggtgtttttcttgatggtaatcattttttagaggtcgt

SEQ ID NO: 425 - DNA, 767 bp; double-stranded, linear
tttgtaaaacttttcttttggcaagcaaactattttgtagaaagcggttcactctgttatcataatagttgtatgaaagacgtatgttacatactaaaaaatagggggatttaaaaaatgacttacacattaccagaattaccatatgcttatgatgcattagaaccttacattgacgtggaaacaatgcacttacaccatgataaacaccacaacacttatgtgactaacttaaacgcagcgattgaaaaacatccagaattaggcgaaaaatctgtagaaaacctaatttcagatatgaatgctattcctgaagatatccgcacagctgttcgtaacaatggtggcggtcacgcaaaccatacattcttctgggaaattatggcaccaaatgctggtggacaaccaactggcgctattaaagaagcaatcgatgaaacatttggtagctttgatgaatgaaagctgctttcaaaacagctgcaactggccgctttggttcaggttgggcttggttagttgtgaataacggtaaattagaaatcacttcaacaccaaaccaagattcaccattaatggatggccaaacacctgttttaggtcttgacgtttgggaacatgcgtattacttaaaatataaaaacgttcgtccagattacattgaagcattctggaacgtkgttaactgggataaagtaaacgaacttttkgctgcagcaaaataagtttgccaatggtaaaaggaaagagtcaaatgacggccgnca

SEQ ID NO: 426 - DNA, 2114 bp; double-stranded, linear
gcaggtactgggatggccgttttcttcgcattacaattataccttgacttcatcaacttattcttagctttcttaagaatttttggtaaaaacaactaacatgaacgtaaaagaggtngggacagaagcgtttaactccgagaaataagaaggaatttccgaaaattgttctttaatttttggataattccggcttatttccgaaggagttgcttctgttcccgccgtttatcagtttttgagcgtggagcaaaaatccaaagtgatttttgtcccacgctctttttttaacccattccaatagcgaaattcaacagtttatcggagtatgttgggttttcyaaatcggttttcattgtttcgttcagtagactgagctgatcggtaatgatgccatcgacgccataaaaaatcattcgtgtcataacatcttcatcatttgctgtccaagcataaacctttttcccatcatgatgagcggcatttacaaagttacgattcattgtactgtattccatagtaaaaaagtcaactggcattttaggcggtcccacaatgttgaaaggaataacgtagcctacataaaagcgtggttcttctttctttaaggccatcgccgtatcataggttaaggtatgaaggatatggccgttttcaaaaatattttcacggtattgtttgacaaagcgctgtactaaatcagggctatcttgaggcgtggttttgatttcaattaataaacgttgttttaattgattggctttggctaaataatcatcgaaagaaaccattttagcagtttgaccattttctgtgacattcatattcgttaattctttaagtgttaattgattcggtcgtttattaacgcccgttaacgcccgtaaattaaaatcgtgcatgacaataaattgatggtctttggtttcttgaatatccatttcaacataatcaggttttgccttattggtctcgattaaagagtccaaggtgttttgaacgccattgttaccattaacaccacgatgggagatggtaaccggttttcggtcaggtgtatgacttaggtaatcgtattataggtgcctacaccaatnccgaagatgantgcaatcaaacmaaaaagacgactctgaaggnggtccatcnacccgamccygatttcggggtgaaccattctggcgtgtcaggcaaaatcccttcatcttccatatcatcnacaatwatgtaaaaaatagcmacactwgacaacaccaagtttaagagcatcatamcctgaaggagtgtcatagcgatgacagcgctaggtaaagaccactcaggtttaaacgtttcgactgcggtttgacctaaaaatatcaagaaatagccagccgtaaaaatccctaaaacagttcctccaatgataataaattgccctaaaatctggaaaaagcgccgctttgtaatttgccaactacgttttaaagactcacgaaaccaacatcacgtaaaatcaactctggaagggcaaaagcaagtcgaatcgctaaatataagataatcagttctaacaatacgaaaccaataataataatgacgcgatttgcaaaaataaaatctaagataaaggctggaatcttaactcttgttaataaataagagcggaaggttaacccacttaatggtaaaatcaaaaagaaatatgccaggaaaaacagaaaggtaattcctcgaacttttttgatctgaagcaaggtgccgtgcaataattgcgttagagtaattggttgctttttcttaataaaatagacactaagcaataaaaaggtaaattcaaaaaagagcgccagtaaaattaacagcccaattagtagaaaagtcaaaaggacatagggatgttgcgtagcaattgcccctaagttatcgtaggaaatataatcaatcccaccttctttgagtaccaatttggacaaacttgtcaataaaggcaatagaacgaataacataaatccgtgcatcaagagcacatcgcgaaaatacgccgttgtccctttaagaaaatctagcgtattcacmatactatttttaaaataactaaacatcmaaagtcccccagtttctaccmaaattcc

SEQ ID NO: 427 - DNA, 1065 bp; double-stranded, linear
caattgtctgaacacatttagcgccgtcctgaattaattcatggcagcctgttgaaaaagactggaaaatacttcccggtacggcaaatacctcgcgcccgtaatccatcgccgcttgtgcagtaattaaagagccactattcttacgagcttccatcacgcagacccctaaagataatccagcaataatgcgattacgtgcaggaaaatgatattttttcggcccactcccattcacatattctgttaaaacaagctgattctgcttcatagtttgctgtaattctttcttttcatacggataatatacatctaatccagtgcctaaaattccaattgtctgacccccgttctggatggccatctcatggctacgactatcgatacctttggcaagaccactgacgattgtgaacccttctttgactattttaggaaccagagcttcagtcactcttaacccatacgaagtggcatagcgagcgccgacgatgccaattttccttctacttaacaattgtaaatttcctctataaaaaagaattgctggtggattataaatttctcgtaataatttaggatagacggcatctaaaattgtcataaattggtgttggcattgtcgtatatataacgcttcactatgaatcgtatggtgtaaccaagattgttcaaataattcacgatatttcttgatttcagcaattctaataatttctgtactggaaaaatcaacacgcttttgtgcgatagcttcttgtaacacttttaagatccctaaattgccaattccttggcataccgctaatttaaataataattgtcgttgtaaaatttccaacaaaaaacacctctttcacatcttcttaaaataagaatacgtaaaaaaagtgttttatttttaaatcatatcttttattggcgcaaacgtacgtcgatgaatgggcgttacaccgtatttttctaacccgagagakgttcttttgttccataacctgcattgyntttaaatccatatccaggatataatccatcatatccttccattaatcgtctctggtactt

SEQ ID NO: 428 - DNA, 3212 bp; double-stranded, linear
ctgacnagtgcacacagttgttggcgcgatgctggacgccctcgtttttgawcttaagyttgggctctcttctgttkgttagccagtncagctcttttgctgctggtctttttcagcctttgcttttyccrctyccgcatttttcgctaatycttmaagcttggcttgttcttgtttcgcagctgttactgcttgttgatctttatcattttgyactttagcagcattcgtttcttttgctttttcttcgacaacagcttgttgttggttaacgtctgtttgagcttgatcyactactttttgttggtcatcaacwgcctgtgtatccgtagccacttgctctttggctttttcaatggctgaaggtgttgcttcatccacgacttttttagcttcgtctacaactgcttgttggtcagtcactgcttgttgactttgatccaatgcgtctttgttttgatcgaccactgcttgttggtctttaacagattgatcaatggcgtctttttcttttttcgcagtgtcagcgacttgttgtttttgatcgacaattgcttgtttctctgttacttgttgctgtttttcagtaatagcttgctccgttgtttgtgtagctttcactgttggttgttctgtagaactgttttcaggtgtttttggttgcgcttgttctgctgcctgtacttcatttcccccaatacctgctacccctgttgcgactaaaatacttaaccctgyacttgcgatctttttcattttattttcctcacttccgattatttttgttgtaaatgggatacccattgtctttacgccattgttgtaacgctgtagttgttatrtggaactcttccgctatttctttaaactgtaarcccattytttgataggcttcaaatctttccttgctaatatgagaagaaaattgtctggtgcttgctgtttctatcttttttgcaagttcttgtattcgtttaaaacgctcggtatcttcattcctataccagtctgcgtcttcattcatcaatgccaacatctctttacgccaaatactttgctctttttttgtcatacccctctcacctcaaattaatagtaaaaaaataacatttattaaaaaaatactatccttcttttgtcttcttggacttaccaaaaaataaaaatattttcgactagtttatggcgtccggaactagaaaccctaatagacaacggtaaatgtaacaaaattattgttacaagtgcctatatgcattgcagcacacaacatatcttttacagatatgcgctctcccattacgaagagcctattaaatattacttaataataagtgttttagcctaaatcccttagtagctgctctgattaatttaggcgctataaattgcttcctctctggttcaaaatgtttgtttactaactatcgttatcatagttattcatttgcaaaagcttatgattacgacgtttgcttacactaaccaattttttgttgttaatgtactaaaacaatccttcgtccgaaataaaggagggccactccaccgctgaatcattaagcctatcttaatcttccactctctccacattcttcttacagagatttcacaattgtttttttaagcaagtccaagaagacmaaatctatcttatgattttttatcgtagtccaaaaatttactcattcctctaccggtaacttttaacggaccactaggagaatttcttctagcgattaataccccattatggtcataaacatgtttaatttgtttatagacactgcgcaaaggaacttgaccaacttctctttcgcataactttttccctttaaaatacttctctatttgaacagcaaacatcccctcaattctatatgtttttgtctttctaacaaactttgatgtagcattgggtaacttacgcttctctcgttgaccaaaaacaataattcggttgccgtagtacccaacatgttcaattcgtaatactgaaaagcaactcatttacattcccccaatcgaatattttttaaataaaaataagagccatgcaacacgttgtttgcacggctcttacgagtagttccagtacaaacaatgcgtgaaagcattgaattattccacaagcgggtcatttttagaaaatgagcgtgcttgctacttggttttttattttttcaacaagttaacagacaacaaaaaagcggggaatatatacatgaactgtatacattccccgctgctccaacatttatacaactaattaaaacaattcactgtaaaaacttttcctagacaaataaaggagtttaaaaaagtctagaattttacataaaaaattgttatactatacgttgtaactaatgttgcaacaaacgagaaccgagtatagttcatggggttctgttgcaaagttttaaataaagaataaaatcccttacggtatctatgatttaagctgggattcccaataataccttgatttcagtacagaccgaaaacccgaagagagtgccttcttttcgggttttcttatataatcctcgaatggcttccatgcctttaatcgtggtagaggcagtgcgtaaacttcgatagaatttattgcgtctctttactggacgatggtcttgttcaatcaaattattcaggtatttaatggtacgatgttctgtcccttgataaaagccgtattcttttagtttcttaaaggcacttgtaatagagggggctttatctgtgactacaacttcggttcatcaaactgcttcactaaccgcttaagaaaagcataggctgcttgtgtgtcccgttttttacgtaaccaaatatccaaggttaaaccatctgcatcgatggctcgatacaaataatgccattttcctttaattttgatgtacgtttcatccattttccatgaataaaaggattttttatttttctttttccaaatttgatagagtagtttgccatattcttgcacccaacgataaatcgtcgtatgagaaacgttaatgccacgatcatataagatttcttgaacttcacgatagctaaggttataacgaagatagtagcccacggctacaataatcacatcctgctgaaattgctttcctttaaaatgattcatcgtcattcctcctgctatctttttctattanaccacacaatatatttccaattacctctttctaatactggca

SEQ ID NO: 429 - DNA, 1488 bp; double-stranded, linear
attgagtgaggtattacngganattatggttcgctatggcgaattatcaactaaaggannaaatcgtaaaacgtttatcatgcagttagcacaaaatgtgaaacgtgcgttagctgattttccagcattgaaaatccatgcagatcgagacagaatgcatattttattaaatggggaagatagtgaagaagtgattccgaaactaagtaaagtgtttggaattcaaaatttttcgccaagtattcgtattgaaaaagaaatgccagcgattcgtgcaatggttcaagaggttgttcgggaagtttatacgccaggtaagacgtttaaaattactgctaaacgctcggaccattcatttgaacttgattcaaatggcttgaatcaagaattaggtggggccgttattgaagccattccggaaattcaagtacaaatgaaaaagcctgatattaacttaagaattgaaattcgtaaagatgcggcgtatttatcttatgaaacgattcgcggtgcgggtggattgccagtgggcaccagtggtcgtggtatgttgatgttgtcaggaggcattgattcaccagttgctggttatttagctatgaaacgtggcgtggaagtggaagctgtccattttgctagtccgccttatacaagtgaacaagcgttacaaaaggctaaagatttagctgaaaaattagtcccttatgtaggaactattcaatttattgaagtgccctttacagaaattcaagaagaaataaaacgagttgttccccaaggctacttaatgaccattacacgacgtttaatgttacgcttaacagatgcaattcgtgaaatgcggaaaggtttagtcattattaatggtgaatcgttagcacaagtggcttcgcaaacacttcaaagtatggtagcaattaatgaggttacctcaacaccgataattcgacccgttgtttcaatggataagacagaaattatcgaaattgccgaaaaaattgacacgtttgaattagccatccaacccttcgaagattgttgtacaatttttgcgccaccgcaaccgaaaacacgacctcgcttggataaagcgcaagagtatgaagcgcgcttagacttggaaggtttaatggctcgggccttagaaggactcaaaattacagagatttcagcagaaacagcgaaagataaacaagaagacgaatttgcagatttcctataagarataaatacagtgacggtcgcttagacgtcactgtatttattttgtacttatttcacmaacaagttgctcggagaggggaaccgtgataaactgaatatgtgaagtaggtaacaaggaggacagaggatggagaaaaaaatgcctaaagcaacggcaaaacgtttgccggtttatttacgttatttaaaaatgttaggggattctggtgttaaacgcattaaatcacgagagtttagtgaaatgatccagattccttctgcaac

SEQ ID NO: 430 - DNA, 1145 bp; double-stranded, linear
acgatggtatgtgcccttttccgacgacctgtcaacncnaaaaccttgtatcctagcagactgttcgtcttttccgatctgatctcttgattgtacttgccattctttcgtacttcctcgttcatggctaaagatcaatgtatttnccttttagtttttctgtatctaactgagaactatcgatagcaccgtcagtcattganctgcgacagcgacaatatattccatcatatctgttgctaaatagagttttggctctttgccctcgttatctaacgatccaaccaatgaaatcggtacatccattcccatcgcttttaatttcatctctaagttgaatgctttttcttttttggcatctacttgaatcttccccagaaagcgatgcgtctttgatttgcgtgatgagcatcccaatcataggattcgtttgtgcaccatcttcttgtgaaaatttcatgtcactaattgacatagagaaatcycaaaccccagattcttgtgcgttytgattgccgattccttgaatgaactcatctttcgcacttttgccacaacctgtcagtaacaaagctgaacagaaaacgcctgcgacaatccccacttttctttttaacacactttttccccctcattatataaaaaattaattcccttttattaagaatagcaaacattgcttataaatagcaatgtttaattttagatttcctctcttttaataaatgggattgatttaatcttttaggtttgaatcattaagctgtattatttttaaaataaaattgcttttcgccaaaaaatactgggaaaagttctgctaaactgccagctaaaggaccttctcgcaattctttttcagtgacccaaaacaagggttgttccgtttcttctggtagttcatccgctgtttctgcaatgaataatgtggctaattcccgcgcacctgaacaatcattcagccattctgcaacacctactaattgtggcttcagcactaatcctgtttcttcaaggagttcgcgaaccatggctgtttccatgccctcgtttttttcaacatgtccgccagggaacgtccaaccaggccaatcctttttttgtcgttcttgcacaaggatttcatttttctgattctaatcata

SEQ ID NO: 431 - DNA, 4628 bp; double-stranded, linear
cagaaacactctttttttgtaaaggattaaactttaaagaaatctatttagaaaatgctgtaaaagacggcctagaaatctatgtttctgaggtgccttatgaggttccggcgcaactaggaattatcgtgactgacattaaaaaagcaatggctgtgttaagcatggctttttatgattatccacaaaataaattaaaactgattggctttactggaaccaagggtaaaacaacagcggcttatttcaccaaatatattttagatgttgctacacaacaaaaaacagccttgctttctaccatgaattcgacattagatggcaaaacattctttaaatctgccttgactacacccgaatctttggacttgtatcgaatgatggcaaccgctgttgctaacgggatgactcattttattatggaagtttcttcccaagcctacaaaactaatcgtgtctacaagttattttttgatgtcggcatttttttaaacattacccccgaccatatcagtccaattgaacatccaacctttgacgattacttttattgcaaacgtcaattgattacacattctaaagtcattgtgttgaatcacgaagctgattattttccattacttaaagaaactgcacaacagcaaaaagtcccagccattgtctatggcagtcagccggctccagaagtagactattcattcgctgtttcttcagaggattccttacgttttatcgttgaaagtcctgcagatgcgttaggattggccggctcttatcaccttcgtttaggtggtgattttaacaaaggtaatgcgttaagtgcggcgattgctagtgtccttgtgggagcttcaaaagaagagtgtcaacaaggaatcgcagcaaccaccgtccctggccggatggaatctttaacgaataccaacggtgcaaccgtctatgttgattacgctcataactatgacagtttgaagaatcttttaacctttgtccgtgaagaacatcctgacggccgcttaattgttcttgtcggtagcacgggagacaaagcgatttctcgccgcaaagactttggtagggttctttctgaattggctgatgttgcagtcctaacaaccgatgacccagccagtgaagatccagcaaaaatttgccaagaaattcaagcccatattaccaaagaaatgcctgtttacaccgttttagatcgtggcgaanaattgctcacgcattatctttaagcacaacggctgatgatgcgattgtcttagctggtaaaggcgccgacctttatcaaaaagtaaacggcgtagatgaaccttacgcaggagactttgcccttgcggaagctttcattaataaaaagractaaatcatttaaacacacatgaaaaaaacaagctgcaaccacttatcagcaaaggttgcagcttgttttttaaagaacttcttttattttcgttacttcttcttctgataagccatgaccgccatccactagtaaaaagtcgactggaaaatgtttctttaattgattagctaaagaaagaacttgtcccggaatactcaactcatcctgagcccctgttgtgacaatcacttttgtcgcaaactcaccagatacatattgatagcctaaattgcttggatgcagtaaaataacagtgttagcaatagttgggttcttttctaacaggcctaaaataaaattggcaccgttagagtaccctataaaaataacttcatcgtataacttttgcggttgccaaacttcttctagaaacgccgtcactcgctcatcaaagttagcacgagataatgctccattgactaatggcgcaaaaaagcgtcgctgttcgcctacaccttctgtccctaagtaacttagaacactcgcttctggataaagggttgcgatggtggttaataattgatattcattgccaccagtaccatggaaagcgacaactaattgattaggtttcgaccctttttgaaaaaattgtttcatttaataaacctccaagaaaggaattttactatgtatgcacaaattcatcacatctctattttaaatcgattgataaagcctacatttgacttctatcataatacactgggattaaaattactaatgaaaacgatcaaccaagatgaccacaccatgtatcacttgtttttctcagataatgagcaacgaacaggtaccgaattaactttttttgaattgaatgatggccaagatcaatcctttgggacaaatacgattgaacgaactattttaaaagtaccaacgcgcgcctctttggatttttgggcagaacgtcttgagcaagcgggtatctgccactatggtgtggaaacatttaaccaacacccaattttgcgttttgaagcgcccgataatacgcaaatggcgcttgttccgttacgtgaatttgaaaatgcggaagattattttccagctgagcattccgaaattccagtagaacatgcaattttaggcattgatgcaattcaattacgcgtccaatatgccgtagctaccaaacaacctttagtggattatttacattggcatgaaaaagaaacagtacctttttttgaaactgcgcatgaagtaaccgttctggaaaatcatcatccacagttttatcaagaggtgcatatcattgatgaccgtaccaatccgcttgccattgaaggaattggtggcgttcatcacgtcgcctttggggtggaagatacgcaagaattaacgcaagttgatagcctgttagaggaaaagaattttacaaactcaggaattaaagaccgcgaatttttcaaatcattgtattttagagaaccgaaccacttgttatttgaagtagccacacaaaaaggcctgctagatgccgaagcctatgaaaatcaaagctcaaactttgatgaaatccccctttatttgcctcactttttggcagatcaaagagaacgaatcgaagcgattttagcacaacaacgccatgagtaaacaaaaatagcggttctaaccgctatttttgttttttaatatcctattattgcccttttttgaaaaaaaggagtacactaatagtagatgaactgcgcaaggaggtgagtacatgttatctaaggaagaagttctacacttattgaacgaagcaaaaaaagaagtcgatcgtttagaaacaaaccgccaagaagatttaggtaattcaatcaactatattgaaaatgaattacagctccaacgtgtcttatctcaagtggaagcttatgaaaaagtacttggttaattgattacgcattaaatgagagaggagcaaccagattcaggtgaatgaatctggttgctcctctctcattttttactagactaattcgtaagcaagttctcgtgcaataatttttgcggttgtttcagcgatttctccagtaaagccaatgcattgttccatatgttcaggtgaacccatcgtcattttacttgtcaaaatactgcagcaaaccactcgatgcttttgtcgaaaactttgatgcaattcgttggctaaagccatcgttttatttacttgttctcctttggcttctgtccgaccaaaaaagtagcccagacacataaccccgcctgaaagagcaccacaaatacacttcgctcctccaacacctacaggaaacccagaagccatggccacagcttcaatgggaatctccgcatcgaagtgttgccgaatggtcgccacaatcgcttccgagcaataaaaatcaccgttacgataataggcttccgcttcttccctgattgcttgtaaacaaattctctttttcaaaatgccctccattctgtatccgctttcattttatgaataaaaggatgccaagcatccctttattttatagattttctgcagaggtaaatacttctgacacatcatcatcgtcttctaacttgtcaaccaagcgctctaattgcgctttttgttcatcgttcaaggttagtaaggtttgcggaaccattgttaattcagcttgtgctaatgaataacctgcttgttctaaagcatcgcgaaccgctgtaaaatcttctggtgctgtgtaaatttcaaatacttctggtgatgtttctatatcctcgccgcctgcttccaaaacgacttctagcatgtcgtcttcctcaattgcatgatcttctcgcttaatgacaatatagcctttacgatcaaacatataattcaccgaacccgtttcacctaaagagccaccatttcgagtaaacgcgacgcgaacattggtggccgttcggttgcggttatctgttagtgcatgaactaaaactgccacgccacctggcccgtatccttcataagttacctcgtcataatgttccccttcaccagcactactggctttttttatggcgcgcgcaatattatcattgggcatattggctgacttagctttatcgactgctaaacgtaaagcaggattcattgcggggtcagggccacctgcttttgccgccatatagatttcccttgaaactttttggaaaattttcccacgtttggcatcttgcgcatttttacgcccttgaatgttgctccatttgctgtgtcctgaca

SEQ ID NO: 432 - DNA, 2651 bp; double-stranded, linear
aaattattgaagttattacaganaaatttgagagtagtggagaaatcgatatattatttaatagctttgatttagtctcatattggttggwacaatacttttcaatamatgaactttctgaaaatcatgtaatatattwrcgcatagaagaaattttagaaaaatattatttagtggatgaagttaatactgaggaacccgcaataaatataagcaagacmgraaacattattatatggaatattactycaccaattatcmaaaaatwggratggcaaaaacaagtagttatgaacggagctcattagtgaactcattgatacgcttgaaacttctgatttggatactttagatcgaatattttatcctgaatataagaaaaaaatgactggtttgcttattgatgataatggtaaacttagagttcctactcacggatttcaacttttaaaaattagtgagtacgagacgaaccagttgttggatgagttaggagaatacttgaagggacaaggctatgtatatggtgcgattcctaaaaaagacaatctacaattttgtaataaaatagttggttttttgtattctattttagaaagagaagcaaatgtattcaataaaaatcaattgttaaaacttttaatagctcaaattgaaacccttcttcctgtacaattaagaggagaatcatcctataataatgatatagctctttcagttcaagagaaagatcgtttttttgagcagttaaatgaggataatagaaattcaatagcgactaaatttttgttagaatatgtagttgcatcaccaattactggagaacaaaatgtaggaaagtgggagattgagcgacttttagcaatatgttcattaataattgaatgggcacaccggagtgattattttaaatataattttgtagatactacaatgaattttttacaatcaaatagaattggtattaagaagaaagactttaaaaatgtaaattcggcaatgttagcttctaggaatcttcaattggcaaactctaatttacctatttcggagaacagaagatatgttgaaagagtgaaccaactttttaaatctaagttagatagtgcatttgttgaagcatttggatattcatatgaggaatttaatttagtgataggaggtctaatagatacacacaataatttagagaaaatagtatggattgaagaggaagaggagttagttcgcaaaatatttaatgatttagacaaaaaaattagtgagattaaaatagtatcagtattaaattctattgctcttgtagaaagagaaaaatatttaactccaccaataggatttgaaaaactagatattttcccttggagattcaatcgtcgattgtcattcattagaagacctctagtaaagtatgaaaataagtatatgtttggaattaggaatgtaatacacgctcataaatatttaatgcgactgatttggggtggatgtttaaaaacaaatagtcgtaagatgaaagatgttatgtctaaattacgaaatatactaggtgatgaatttaatgatcgggtaaaaagtatactcgaaacatatcctaacttacaagtaatgaaaggggtatctaaaattggaaagaaacgtatttctggtgaaaataataatacattgggcgatatagatgttttcgctattaatcgaaaacaaaaaaaattatttgttatcgaaaccaaagattttagcttttcaagaaatccctatgaattagctatggagcaagaaaaagtatttataggagataaagcttttttaaacaagcacttaaaaagaagtgattggattcgcaaaaatttaaaatatgtgattgataattatgatttagaagatggaaagtgggaaattgttactatgtttgttgtttcagaacatttgataacaaaagacttggtagatactaaaggtgttaaatttatttcattgaaagagctagattataatatgttccattaattggaaactagtaaagttttaaagttataaaaaatagtattgttctgattcacgcatatttttgggtacgtctttaggtacgatggtcttaaaatgtggtgaaattcattaaaatcgtacccgttgaaaagttactcagtttattgctgttaaaaggttttctaactcgttcaaaatctctgtcacagaaccaggtcttaagaaagctcgtaaagcttcacagttctcaaaacgttaattatttggagtcgttgcgaacgtgttcgcttacgaatcaattacaatgtttcaagacactttccattttttggaaggtgtctttttttatggtagcgacagtgtgtgttctgtcataaaccagtatataaaaattcacatactgacaatatgtttatctttcttaccaagagaataattgattccgatttcagcaagtatcctcattccgaataacgcacttacgcaaatgatacatttctttttagttgatttcctcattttgatcgccgctatttcttttttctttgaattcattatacgtttttgggagatatttctttattaactttttctctcttgcgttttggagggagtaagttgcggttttttgagagattagtatgtttaaactgaagagttattaa

SEQ ID NO: 433 - DNA, 1966 bp; double-stranded, linear
naaggcccgtgtggttggaaagccgntacgcattgcgaattagtcgnacaaaaggcaaatattttgacgtatatcaaaacaattaggtctgacaawggaaggtgagtcgcgtggctagaaatacgtttgatgtagatgagactttagaaaaagaatttaattggtcccactataaacgattaggcgcctatattaagccttacaaaaaagctgtttttaaaacattatttgtcatcatattagctaatctggcaagtatgttaggcccttactttactaaaattgcgattgaccaagtaattccacaaaagaatctctcgttactcttgatactaggggctattttcctattttccttggtgattattggttggtgtatgcgttatcggatatatgccatcacagaaattggacaagatattttaaaagatatgcgtttttcaatttttgagcatctacaaaaattaccattttcttactttgacagtcggccgcatggaaaaatcttaattcgggtggtcaattacatcaatacgttaagtgatttattaagtaacggattgatcaatttaatttctgatttatttaatgtgattatcaccttaatcttcatgttatttattgatgtgaaattaaccttatacagtttgctgctattgcctgtgttgttcgtgatggttctatttatccaagggaaacaacggaaagcttaccaagagcttagcaataaacaatcaaacttaaatgcctatattcatgaaagtatttcaggaattaaaattacacaatcttttgcacgagaagatgaaaatttccagatttttaacgaggtaagcgaagaatatcgtcaatcctttatgaaagctgtgcgtgtccagtatttattatggccagcagtgcaaaatatatccgtcattacgacttgttttatctatttcgtaggaatccgtcaattaggtgtgtccgttaccactgggacgctaattgcttttatcggttatatcaataacttttggaatccagtcatcaatattggtaacttctacaattctctgattactgcaactgcctatttggaaaggatttttgaaacgatggatgttgttccagaaattcaagatgcgccgcacgctattgagttgccgccaattaaaggaaccgtcgactttcagcatgtttatttccgttatgaagaaggaaaaaatattttgaccgatgttagttttcatattgagccaggacaaacaatcgccttggttgggccaacaggtgcgggtaaaacaacaatcatcaatttgttaagtcgtttttatgatgtgaatgaaggggccgttaaaattgatggttatgatgttcgcgatgtgacactccgttcgttaagaaaacaaatgggggtaatgcttcaagatacgtttattttttcaggaacgattattgaaaacattcggtacggaaatttagcagccacagaggaagaagtcatccaagccgcaaaaattgttcgtgcgcacgactttatcaaggatttaaaagatggctatgaaacagttgtggaagagcggggtagtacactctcggcaggacaacgccaattaatttcatttgctcgtgctttactggcagatcccaaaattttaattttagacgaagcaacctccagtattgatacaaaaacagaagaattgttacaagaaggactacaacaacttctgaaaggacggacatcgtttattattgctcatcgactttctaccatcaaaaatagcgataaaattttctatattgatggtggtcgtattgtggaagaaggatctcatgatcaactaatggcaaaacatgcgttatatcatcatttatatcaatcgcaatacgacttattamagagctagatgataaaacagagaaaattcttagttgaatcgttctctgnntttctgtatcgtaaccttaacaaaggnnaaaatgg

SEQ ID NO: 434 - DNA, 2809 bp; double-stranded, linear
ccttctataaatatatagtcaaacttaaagttctgacctgcttgttnnagttagaaatataacgcaactagcttgtgtcatattcaacataccatgactgtactcgaagaactgtttaaaaagatttggtctactctttaacccaagcttccgtttcaacttctccataattgctcgccacaatgtattcataaggtaggctgtctataatgttaggaatatcgcgtacttttattacttccgttccattaaattttgtagaaacaataaagaattctatttcttcattgtaatcattaagaagttgtaacatatctttatctttactaaaaacatagtgatcaaaaatttggggttctccatgattgacatctgatacagagattacttcagccattgataatgcaatttcttcattgtattctattaaaaatattccatgagctttattacccttgtaaatttttaaattttgaatatgagtatctatgtttttcttacacgactttaataggttttcctttaaatgattattagaatacgttaatctatgtctagcaaaagtatcttcatcgatcagtccttcttttatctcattacttcgactctcgaacattctttgtctttttatatgctcggctccttttttcaaagttctacattcttgttttgtttgttgttcttcattattcattttcttaaactattctcctgtctttttttaatattatgcttttactttattttgcacgataatcttactccacaacaaattgttaaattagcattattaaatgtaaaaattgagtatactcatattttacacaaatgacgtatgcccaacttgaatgtcctactgtttacctagtaacaattggaatatgaaaaaraaccaacacggcataccctgttggktcttttagttaatatattttaatagaaaatttatttattacatcatgaaatactgtataaaaatcgtagcaagcacacatcactttttttagcctatcattttacgtcgacagtctagctggtttcttatctcaattttgaacccattgtttttctgctataatcatagttgacgtttgatctgaataatttttwatgatattgytaaattytgtcattgattggcttayttcatcatcagcactttttgakcatttaaaatttagatatttaattctagatctactaattgagtctagattttttaaattaatttttttaaaagtttgtttattrtctacagataagatatattctatcatatacaaattagctaaataaaaattctgtaaataacttttattattcagtatcttgtcttctttactaagtattgggtatattagttttaatttcctattatttttgtctattaaatactcatatataacatacagtaagaatgtatttagcacatataatggtaattctttatttttttttattattttgcatacctcattgctatttaagaaagttgactgattatatttattaagtaagctatttgatacaatataatacatttcgaaaatataatccttagtaactaatttatatatattgtatccatcattcataaacccgttaaaattaaaaggaactacagtaatcaagaatattgaaaaattaaataaagaaaaatattgaaaaaagtcaatttttacaaaaaaggttaatgtaaaaaaaaagactaaatattggtcctccggttaacaacctcagaattttcttattattaaacgtagttggcttatatctaaataatccaccaaaaaatccccactgtgtatttaatctaaycttaaactgwttttcccacgaaagttttataaacccaaatattaatgactctggtctaactttattaaataatccaaaarctaaatgacctaactcatgtacaaagatagacaataacaaggaaaagtatgcagtagacactaaatttaattcaaaaacaagagtaaagattacgagaagtaacgtaaagatcatcggagatataaatttcatctattttattctcacctctttgtatttaagcatgctatttttatctataaaagaatcagcattttcaaataaagtatttaatacttcatttgaatctttagaattatctacattctttgacataatagctgctaaagtgcgcttacttctggagttgctaaacttgttccaaaagaaagtgtatwaccatctgggaaagtcagcagctttgcctagtggagaaactagcgatgtagggtaataagtcatcatcatttcacgagcatcaatttgtcctgttawtttgtaatkgtcaccatatcctcctgcaggaccatatatwgagtrcattagacccataattagaatagtcagcaatatcaccactcttttttgtcgctccgacggtaattacagactctagtcctcctggtatatgtttttcattaccagtgcttatatcacgcgactcatttcctgctgatgcaacaattagaatgttattttttcttgcatagttaacagcttttctgaatgcttctacagtaaatctttcgtcgtctatttccatatttttatatgatccaagactcacatttattatatctacttgatcatttgtagcatcaactatagctttaagcatatttatagagtttccatctgtcccatccatcaccttataagaatttaaatttactcttggaggcaatcgtgtctattactccagcaacttgtgtaccatgaccatattcatctaactcaatatcattaacatangttttttaatcttangnta

SEQ ID NO: 435 - DNA, 4149 bp; double-stranded, linear
ttaatatctntcttatttattgacataaatttattacccntcgcaagtacagttagcgtctcaagaacattttcttttaatattaatgaactttttatagagtcttctagaaaaactttggcttttatttcttgatattgtgtattttgaagcagctctccagataacatcattgtatcaataataaatgtatagataactggatcaattttagtactaatttctttttcattttgtagttctttaacagtactccagtaaacgtcaaaaaaacttctattattatagaattgtttaacccattcagttatcatttttttatcactaggaattttattataaaatatgatgagttcaggatgttgctttcctaattttaaaatcatttcaaacattatttctaaacgatcttttagttttaaaggagcgtcgtttatagtactaacatattcatctaaaataacaaaaacgtgttctatcgcgactgttaacataccttctttattgttgaaatactgatataatgatcctacacttaaatctgctttactggcaattttacgaacagaagttgcttcataaccaactctcccaaattcatctaagatgtagcataaaataagttgctttttttctaattttagtcgattaaataattcagttgctgttttatacataactatctcctcaaaaaagatattktaatttagtataccatatttattatataaaaacgaccgctcatttttttgcgatccttaattgaatcttrgcttgayaaaaattaaattacatataaaacagttaacctctgtaagagaaaattgccaaactatctaccttctcaaaagtctattatcctttatcaaaaatagctatatatttatacttctttatagaagaatagtagaagtaatagcctaactgatatgatagatttaaatgactaaatttgtagattgcgtcatttttgcgcaattttaagtctgctagtccatcaaccagtttttccgtatattccgtatataaggatactattaccttaataattatatttttagagattttaatatacaaaatggaatggtaacgttctttttgacaaaaattataaggtgttgtgaatgccgtgatgttattgctctgattgcttttgacaatgagcctcatcggatctgattctctccggcagaagcgcaatcatttaattacgctgcctctccaaagatatcagacccgagctcattatcaagggctcgctttgccaatctctgttgtcgaaattgtatcggtgtttcatacccaatgtcccatgcaatcgcaggtagttccaccaatgcacataatcaaacaattctaggcgtagttgtgccaatgttttaaattggtattgatgcacgaattctactttgacaaatttatacgttgattccgcaacagcgttatcatacggaaagcctttcttactcaaagagcgcgtgatcccaaacccatttaaaatatcatcgatggattgattatcaaatttttttccatgatctgcatgaaaaagtttgacgtctgttaaaggatagggaatccgaccaaaggcttcttttaccaatgcggtatctttttttctcaccacaagaataaccgatgatttctcgattaaataaatcaagaattaagaagatataatgccattttttccctacgcgaacataggtaagatcggtgacaatagcctccaatgaccgtttcttgtgtaaatgtccaatctaatacaatttcaatacattcgttgtctccgcttcattacaagctgttcgttgggcattaaaatgagcgatcgtataggtgaatttcaacctgcgttgtttcatgatccgaccgattctgcgacgactgatttgaagcgcacgcttggctaagtatttctttaatttcggggtgccgtaagcttttcggttacggataaattcttcgtgaataagttctttcagatcttcttcgcttttaatgggtgttgcctgattaataataggtctgaagagaaatctttaagattttatacagcgctgatatcgagtatttgtgtttgttgacatcaatcacttgtcttttcgtccgaatatcaacgacgcttgctttaaaatatcattctccatttcaagctacttatttttctttcgtagtgcgatcaattctacttattccggggttaaggtatcttttttcttgaacgattctgttgaatgtgtttgcttcacccatttatcgaaggaagaaggcgtaagctcatgttctcgaatgatttctacacgcggcttgcctgcaaggtaaagatcgacgacgtgttgtttgaattcttttgaataggttcttcgttgacgtcttgacataaaaaatcctccagtgtgttttttattattctacacatcttattttttctttctagtgtagccgattcagaaaaagaaccgatagttaattcgaccatattcattatagttaaagacatgtaaatgaaatgatctctcaaagaatatgtattccatttttctcttaatgagaacttactaaataaaaattgacagattgtctcattgcattactttattgtacatcttaaaattatctgccttattttgtttgaccattcactttttttttagatcctaaatatacttttatccgttcataagagcagcctgaataaacacaacctacaataatacccaaaactactgctccaataagattgtagaaaaagccaattttttttacaaatgtttgataaaaatttgtcattattatcatcatgactacactgttacacaagtcatacataaaaaataatttaagaaagagaaaagagatcattcctttttgatcaattcttctataaaaattatatatccaatacaaataaagaaacatacttcctaccaataaaagtaattttagtacaaaccaccacgaaaaatgtggatagaataaaaaatcaatcaaacataataacggaataaaataaaggaattgatgagagtgggttagatatttccaaaaggtttcttgttttaatcgttccatttgttgataaaatttttggtcatctattatttccatttatttactccttatcttaatatcatacatagcaacatgtacaaccttataaaaataaataatttacttatttattttcatcgcaatcgacattcattagtagatatgttkgttagtattaaaagaacttgtgattattaaattagtaaatgttttatcatatagaacttattgatggttattaaaaaaaagcttcttttctataatttaaacacatctataggtagatagatatagaaatttatacaacattcaagtaagaatttatttattaaaaatgtggtctttctagtaaaagaaacaaaaaaccagttaagcattctatctaactggttttttactaaatttcagttgtatctttctatattaattaagttgttattttacgcgaggttcagtttcttcttttacgttttgtacaccatcacttactttttcacttgtacgcctaaagcttcttttgatttttcaaattgtttkgaagcaaattctccagtagcagaagctgcatcggaaagatgatcttgtagagtaactgaatcattttcatgttgttctttcgtttttacatctacgacgtttacattaaycycaattacatctaggccagtcattttcttaacttcatttgaaataacttgcttcattttatcataaattgtagttacatctttaccatattcagccactattgaaagatctactgcgacttgtttttttcctacttcaacatccactccagaagttgtgttatccgtatttactagttttccagctatatttgagaagaagcctccatcaatcgttagaagaccatcaatctcatctaatgcaataccaattattttttgaattactttatcttcaaaaaatagttctcctttaatagtctcaaaagtttttgacatgtccktttttttgakctctgtttttgtattatttgttttgttttccattatttttcctcctaaaaatataaaatttatttttaccgtaaaaacggttattaactaattttgtttgtcaaaaaaaccaaca

SEQ ID NO: 436 - DNA, 1585 bp; double-stranded, linear
cctctatggaatatttttttcctcaagaaatcatttttttataaaaaccatccttaaatatgataccagtggctggctttattttaaatagacaaaaaagagtatgagacaaaaatcactttagatttttgtctcatactcaaaatctgaaaaacagttcgatcccgacttcttcgtttctattgtttggttctggcaacaactaacaagtaactaattttacgaaatccatgacaatattcattattgagcatattcaatccttctactaattttcgtataagataaatattgattgaatgtgttgacacaacgaaaggccgtcctattcgcatattgatcataataacgcttggtataccactgaaattctttcgtccaaggtttgacatggccagtaaagtggataatggatggtgctcttctcgtttcttcatattgtttttctccataaatagttggatgttttttcgcttttgacagaatataaccttgggcgttccacttaggatgcaacagggtccaacggtcgtgtaaaaccgcattcaatgcatcttgatcatggaaacgtaatttatctggattttcttcaataaatcttaagactttagtggttacatctaaattcaaccattttttaacatcgattagcaacaagcctgagttaaaataacacatagattctgcaggaatcgccattttttccaaacgttgatggaaccctgcatcttccacagcggcgatgatattttcacctaaatcaactgtccataattttgcgacatcatctaaggcaatcatgtcacaatccatatacaacagccgttcgatctggcttcctctaaacagctctggaatagcaatcctgtagtaagctgttttgggaattcgttcactggttacaacatttttgaaaaaatgggggttgatttttaaaaatgttaactctgcattgatttgggtatgtttaatcgtaaaatacagtagttgcttgctttcaaaattgatattgtcatcaatcacataaaaatgaacagctgccgctgaaggactattttctaaaattgaaacaaacatagcagcaagatgcggtacaaagttggtattgcaacaggagacaatcgctaattcttttctattttccatttcttgcacctactttctttaacttgtttagataaagagctgtataaggatgattttctaacgtattccaaggtttatcgtgtccagtaaaatgaataatcgctggctcttgatttcccgctgtatataatttttgataggctacattaggcgcttcatgacgattaaaaactaaagacgtctgcatattccatcttggttctagagctagccaatcttcataaagaacagcgtttaaagcatcttgatcatgataaactatgcggtccccattttcttctagatactgaattgttttttgggtgattgctttctcgttccatcggtcaatatcaataatcataactcctgaattaaaataataatgcggaggaakggatgcccaaacgttcaangcataagctgaccaggatcataaccgcgccaatcgttggttcac

SEQ ID NO: 437 - DNA, 1838 bp; double-stranded, linear
cgagctcggccccccgatgtnaaagtgggcgacactgttaaagtgaaatttagtgttgatgcttgggcnactggcgaaagctattccgcaatgggtaaaaggaaacagctataaagtacaagaagtaactgagagcagagtattgcttgaaggtatcttgtcatggatcagcaaaggcaatattgaattattgccagatgcggcaactgttcctgataaacaaccagaagcgactcatgtggtacaatacggcgaaacattatcaagcattgcttatcaatacggaacaaactatcaaagattggctgcattaaatggattgacaaatcaaatcttatttaccctggccaaattttgaaagtaaatggatcagtagtaagcaacatttacacagttcaatacggtgataatttatcaagtwttgcagctwagcttggtacgacttatcaaaccttagctgcattaaacggattagcaaatcctaacttgatttattctggtcmaacattgagctattggatttttkgccaaaatcggktgaaatttagaggtacctcatttacaatagagttaccttttcatattatgactcttttcgatttagaaaagaggtgctcctatcttatgcccaagtccttaggtaggagcattttaattttactcatacgtagcttagtttaaagctattgtattacataagaaaacacctaccacagatgcacgtacttccccaagcagttgtctgtgcggtaggtgtttttttagattttacttgttaatcataaccgattttctttttttataacaaggttaagcttgaatttatgaaaaggataatgtgtacggaatttatcctaataaaaaatagaattagcctatttctaagctactattacttgagaacagtttccttttaaataagtggaaaattgtagtacagctactttagcgatattccttaatatcccagttctaatttaaagtcaaacacaattttgttaataagttgtgaataattttattggttgaattaacaaaactaatttgctagaataataaagcaattacttgtagtaaaagactacaggscccttgtatcataattgtgcaagggggtttttgtatcgtatatttatatttcatgtctagagtagatggattataacctttttatagtattggtcccatcatgttttaatacactcatttgctttataggaaatagtatggtattataaataagtaatcaattttgacatgtaacgagagcgctatacataagactataattctccttttgcttatcaaacattttttgcaacaaatcgcatacagggtatgcacaaggaggaaacatayatgaacaacggtacagtaaagtggtttaactcagacaaaggttttggatttattacaggtgaagatggcaatgacgtatttgctcatttttcagcaattcaagcggatggttttaagtcattagaagaaggacaagcagtaacttttgatattgaagaaggacagcgcggtatgcaagctgttaatatttttaaagcataataaaggttttggtaaaacgttccaatttaattggaacgttttttttataagattaaattgataggctctgaatgttgaaagcgaaaggagatcatcatatgggatttggaaaatggaaagaaattataccatcagataaaagtaaacagtttgaagaaggacagaaagtatcatttatttacagaaagaattagaggkataatagcgttttattaattaatcagcagaattaatattatagacagttctaagccagaaaacnnaaaaganaaaacagt

SEQ ID NO: 438 - DNA, 1239 bp; double-stranded, linear
ggatttggggtcttaagcgttctctattttgtggaaccctttgagaacaatctcttggtattgtatgtcggatcggctgttttagtgacgattttagaatatgtcactagttatggcttggaaaaattgttccatgcctcttggtgggattatcatgatgtaccttttaatttaaacggtcgcgtggctttaccggtttctcttttttggggattggggtgtgtcttgattgtcaaagttattcaaccagaaatcgccaaagttgtcagctttttacaagcaacctttggcaactacttagcactttgcatagtgattgtaatggggcttgacttaatttatacgttgctgaacatgcaaggtttcaaaaaacttattaccgagatgggccaaacgttggaaacgaaccaacaagaatttaagcaacggttgaacacaaaaatggaaatcgctacagctgattggcagaagttaaaagaacgaaccaaaaaagagcatttccaaaatcggttaaatttccaacaacgtcgttttattaacaattacccaaaactaactttaaaaaacattaaaaattccaaagaagttcggcatctcttagaagatttgaagaaaaagggccaataattaacaaaaaatattacaaaatatttcaatcaatggtctaatgggatgaaaaaaagaaaaatcgtcaaaagctagtttttaakgcgtcttaagaaattcttaaagaattgagatagaaatggactaatgaataaacgcaggataaaaaaagagttgcatttaaattgtaacaaattgtaacataattgaaataaaacaagccctcctgactagtataatgagtaggtgttttagataagttaggaaaggtgttggatttagtgaaggttaaaaagttgataccatttttaacaacaatgatgcttatcaattttggacttccagtcgctgcggcagcagaatcacttgattcgttgcaagaaaaagaagcgcaagcgraacaatctggggagttaattagtaaagaaatcaattcagccttagacgatgtaaatgctaaatatgcggaaatcgaacgtttaaaaacgcaaatttcaaaagcggaagatacgttgaaaacttcgaaagaggaaatagamaamacagaaraaaatatttctcgtcgtaaagaagctgttggcgatcgtatgwaggatattcaattaaatggcgaccaacgtacttggccagcct

SEQ ID NO: 439 - DNA, 2025 bp; double-stranded, linear
ttgaaaaatcccaaattaaagtggaaccagcaggctttgactgcgactatgtggacatccaatggtgattaaactgggtcgctacggaaaattttatgcatgtagtaatttcccagattgtcggaatacaaaagcgatcgttaaagraattggcgtkacgtgtcctgtgtgtcacgaaggacaagttatcgaacgcaaatcaaagaaaaatcggattttctatggctgtagtcggtacccagagtgtgacttcacttcttgggacaamccagtaggccgaccatgtccmaaatgtgggcaatatttagtagagaaaaaagttaaaggcggcaaacaagtcgttkgtatcaatggcgattatgaagaaaacgtccaaaattaagaaaaattgagaccgaagaatttacttcggtcttctcttttagtaaaatgaattgagtttgtaagagacagctcttaacttcttgatatagaaaggaatttttatacatgacaaaaaaagtcacaattattggtgccggtttagccggamgtgaagcggcatggcaagtggccaatgctggggtaccagttgatttatatgaaatgcgccctgtcaaaaagacaccagcgcatcaaacagaaaattttgcagagttagtttgttctaattcattacgtggaaatagtttaaccaatgcggtaggtgttttgaaagaagaaatgcgccgtttaaattcaatcattattggtagtgcagatcaaaccgctgtaccagctggcggcgccttagcagttgaccgtgattctttttctgaaacaatcactgaaaaaattaaaagtcatccattaattacaatcaaaaatgaagagatcaccgatattccggaagggattgtaattattgcaacgggtcctttaacctctgaaagcttatctcaaaaaattcaagaatttaatggttctgaaggcttttatttttacgatgcagcagcaccaattattgataaatcaacaattgacatggataaagtttatttaaaatctcgttataacaagggggaagcggcttacttaaactgtccgatgactgaagaagaattcaatgcttttcatgaagcactagtcaatgcagaagtggttcctttacgcacgtttgaaaaagagaagtttttcgaaggctgtatgcccatcgaagtaatggcgcaacgtggcattaaaaccatgttgtttggcccaatgaaacctgtcggactagaagaccctaaaacaggtaaacgcccttatgctgtaattcaattacgtcaagacaatgctgcagcttctttatacaatattgttggtttccaaacgcatttaaaatggggcgaacaaaaacgagtattccgtatgattccgggattagaaaatgctgaatttgttcgctatggcgtcatgcatcgtaatagttttatgaattctccagagttgctaaaaccaacctaccaatcaaaaaaacgtgacgacctgttttttgctggacaaatgactggtgttgaaggatatgttgaaagcgcggcaagtggtttactcgcaggtattaacgcagctcgtcttgccaaaggggaagagccgattgaattccctcgcgaaacgactttaggaagtatggcttattatattacacatgcagaaggcaaacatttccaaccaatgaatgcaaactttgggcttttcccagagttacctgaacgaattcgtgacaaaaaagaacgctatgaagcaattgctaatcgggccttagatgttcaagctcaagttatccaatctttagattaaattagaaaaaatatgagaaaagaccgagcatcattgctaagaaatgcgatgatactcagtcttttaattttagaaaaaaataacaaaagctaangaatggtaaaattgtgaccatatttagaaatattggntaattcctgaccaccttaattgtcttttgaaaaanggttatgcctaaagttactttgtaatcgaatggggagggctatcacctgggaggaaaagaat

SEQ ID NO: 440 - DNA, 10594 bp; double-stranded, linear
catcatggaatggactggggttcattagtattaggaattctatttgttctgactgcattaatttctttccaaaatcctgccggtaatttaattgccattgtgatggtttttgcgatttttgctattattaaagggattttcgaaatttttgtacgtaatcgtatgaaagaattgctaggctacaaagcttatgcaccaatcatcttagggattattgatatcctcattggtgtttacttattgtttaacttaaatattggtgtcgctgtgttaccattkgtttttgcaatttggtttttattcgactcaattttcggcttatttactttagattttgctaaacgagtaagcacaggttacttctggttcacattaattgttgacgttttagggattatcttaggtgtaatgttattatttaatccattgtcttcagcactaactttaagcttcttagttggcttctactttatgatgtttggtattagtaatattgtatatgcttttagataaaagaagtaaaaaaacaggttttccgaaaaggaaaacctgtttttttttaataacgacggtggcagttgccattatttcccgaaattgttcgaacaagccacacgataatcgctacgggaactaaaatttttactgctagccacaataagcttcccacgataccgacaacggcactaaagagtgaaccgacaactaaaaataaaaggaccactaaaagaatatttataaacattggtcgttgattattcatacgtactacctccaaatttttcctgttttctatatacagagtatagcaagaacgcgcaacaagcacctccatcggaaggctgatttttttctctggcgaatgatggagccgctgttggttattttggactttcttattgarataatcagaatattctggtgtatattataaaaaatgatttaaagtgagggattggatgtcgactgagggattaatcgctttgttagaaaagaaacgaaatcatttaagtaaaattgaaaatcaagtactggattatattttgacgcatatgacggaaattagttcacaaaccatttatgaggtggcgcaggcgttgtttgtctcaacagccactatttctcggacagcaaaacacttaggttatcgaggcttccaagaattaaaatacgcaatcgtccaatcggtgcagagcgagagcacagaaagcgatagtcgtagttttcaagctattacgcaacagttgattgccaatgtgcaagatagttttcaacaaatggatgaagccaaagtcgcggaaatgcttaaaatgattgagcgtgcgaatacgattgaagtgttcggtgttggtggcagttttcctatttgtactgattttgcacgaaagctaacatttttaggaaaaaaagcctatgcacgatctgattgggatgaacaagcggcagcagttaagaatctggatggacaggatttagccatttttgtcagttatacaggagaaactaaggggattttagcgtatgcacgtgtagcgcaggaacagcaagtgccgatgattagtttgatttcgactaaaggaagcaccttggaaaaattgtcgacgacgacgttatttgccaaagggacgacacgttatcatcagcgcgtggatttaagttcaagaattgctgtcatttgtttgttcgatacggttttattaatgtacgcagaggcaaagcaaccgcggtaattttatgcaacaccatactaaatgatgtaaggggatacagaaagagtgtagcctcttttttctttgttttgggctagttataatgagggcaatgaatgtaaacgcaatcatttttagttttgtaaagaatgaatggaggagttaagaaatggcagtaaagaaaaagaaagcgactttctgggagtttttccaaggattaggtaaaacgtttatgttgccagtggctttattagcttttatggggattttgttgggattaggaagttctttttccagtgaatccatgattgaaacgatcccgtttttaggaaagcccgcagtgaaaattattttccaatttatgtcgacaattggtggttttgcgtttgcctatttacctgtcatgtttgcaatggccattccgttggggttagttcggaaagaaaaaggaattgctgcgttttcaggtttcgtaggctatacggtgatgaatttagcgattaatttctatttagtgcagacgaatcgcctcgtggatcctgagcagttgcgggaagccggccaaggaatggtttttgggattcaaacgattgaaatgggtgttcttggtggaattatcgctgggcttattgtctataagttgcataatcgattttatacggtgcaactaccagatagttttgccttcttttctggcgcacggtttgtgccaattattacttcattagtaatggcattcgtgggcttagtaattccgttagtttggccacttttcgcgctaatgattatggcgattggccaacttatccaacgttctggtatttttgggccttttctgtttggttcaggggaacgtctactgttaccgtttgggttgcatcatattttggtttccatgattcgttttactgaagcagggggttcagcggtggtggctggcaaagaagtgtttggcgcgttaaatattttctatgcagaattgcaaaataatttaccgatttcaccaagcgcaacagctttcttgtcacaagggaaaatgccgacctttatttttggcttaccagcggcgtcacttgcgatgtatcatactgcagctccggcgaatcgacataagattaaaggcttactcctttcgggtgtaattgctacggctatcactggcattacagaaccaattgaatttttattcttatttattagtccattattatggctgtttcatgtcattatgactggtctaggtttcatggtaatggctttattaggtgttgtgattgggaacactgatggcgggctactggactttgttatttttggcttgttacaaggaacttatacaaaatggtggtgggttctcattgtcggcgctatctggtttgttgtttattatttcgtctttaaaacagtcattgtaacctttgatttaaaaacacctggacgagacaaggtcttagatgagactgaatataccgatcaagaagttcaatataagaaaacgggtggctatgatgcgcctgggattttagcggctttgggtgggcaagagaatattcaagctattgataattgcattacgcgtttacgtttagtgttagcagatgctaataaagtagatgatgacaaattaaagcaattaggggctttaggcgttgtacatttagatgcgcagaatgtacaagtgattatcggaaccaaagtgacaacggtccgtaatcaattagagatgattttaggttagaaaaaagacagaaggtgaagagtgtgtcgtttgataaagcaattgatcgacgaggaacgtattgtacacagtgggattttgtagaagaccgatttggggaagcggacttgcttcccttcactatttccgatacggattttgctgtgccagaggcagttctggcaacattacaggagcgtttgaaccatccagtatttggctatacgaggtggaaccatccgcaattaaaagaagcaattcaaacgtggtaccagacaagattccagacgaagattgaagaacactggattatgtataccccgaccgttatctatggtatttctgctttgattcaattattgactaacgaaggggagggcattattttacaaacacctgcctatgatgcattttttaaagttattcaggaaaataagcggcaagtagtggcgaatgaactgctttatcaagagaagcgctacagcattgattttattgatttagaaaaaaaactagcgcaaccagaaaatcgctgtttgcttttatgttccccgcataatccaacaggacgtgtttgggagcaatgggaattagagcgaatagtttcattgtgccaacagtatgatgtgtttttactttctgatgaaattcatatggatatcgttaataaaggccatgttcatcgaccaattacgcaatttgattataaaaaatctgccattattaccagtggcacgaaaacctttaattttccagggctgatttttgcttacgccttaattccagataacgaattgcgtgacgcttttcagctcaaattaaaaaacgccgatggtttatcatcaacaagtattttgggaatgctagcaaccatgacggcctatcaaaaatgtggtacttgggttgacgagttgaatgattatttagcggagaaccaacgttacgtgaaagattttttacagacatatttgccaaaaattaaagtgacggagctggaagccacttacttaatgtggttggatgtatcagcggcagttccagatgtggcccgcttacaagcggctttagtttctgtggggaaagtcgctattatggacggctcgatttatggcggtaatgggcaacgatttttacggttaaatattggctgttcgcaagcaaaactacacgaaggacttgaaaggatgcgccaaggttttgaagctgttttacaaaaggatggcacagcatcagcgcttaggaataattgagaaaagatagcattccgaaaatggttgcagtacaatggaaaaatagaaacaaataaaataacaaaaagtaacaacttgtcatttactgggggaaaagaaatgaaaacaattaaaacaaagcaagcaccacaagcaattgggccatattcacaagcaaaaattgtgaatggtttattgattacttctggtcagattccactggatcctgaaacaggcaaggtggttgggacaacgattaaagaacaaaccaatcaagtactgaaaaatattcaagggattttaacagaagctggtagtgattttgctcatgtagtcaaaacgacatgctatttacaaaatatggcggatttcacggcattcaatgaagtctatgctgagtattttagtgcggaatatcctgcacgcacaacgattgaaatctctaaattaccgatggatgtgttggtggagattgagattatcgcagaagtagtggcgtaaaaaatacagttaaaagagtgagaaaaaatcgtcttagatttttttctcactctttttttcaataaaacaatacgattcagccaaaatgtctagccgtgctggaaaattttcagcaaataggctaccatggaagaaaatcgataaaacgaaagttaaatgaatagaaaagagatatgaaagaggctataagatgaaaaaaaatattagccaactaacgcatggttgaaagaacacagtttattattgaaactaatttttcttggttctgtattagttttcgtggctaaccaagtgacacatatcgctcaaggcatgagctgggcggatattttttccacgatggaacaacaaagtacggggcgtttaattggtatggtcttggcaggactattaggggttattccgatgctcctttatgactatgtagtcgttaaattattggaaaaagaaggtaagccaccaatgaaacgaatggattggttaacttcggcttgggtcaccaataccattaataacttagcgggttttggcggcgtggttggggcaacgctacggattaatttttacggaaaagatgtaccgcggggcaaggttgtagcaacggtctcaaaagttgctctgttcttgatttcagggttatctattttatcttttgtggcgtttgttgatttattttttattcgaacccaaaatgtttttcgtgaatattgggtttggttattattgggcagcctgattgcgccagcgctctggtttttcacgtatttaaaacggcgaacattgtttaaaacattttttccaaaagcagtgctcctattattcggcgcttcattaggtcaatggctaggtgggatgtttgctttcttgatgataggtcgcttgatgcaggtgccagtttcgatggtttctgtttacccaatgtttgttatcgctacgttgattgggatgttaactatggttcctggtggtatgggaacgtttgatgtcttaatgattttgggcttatcacaattagggattgatcgatcacaagcgatcgtctggttgttgtattatcgtttgttttattatgtgacgccttttatgacaggagttattttgttcttgcaacaagcaggcatgaaagtcaatcaattttttgataatttacctcggttattttcacaaaaagtggcgcattttattttggtggcggcgttatattttgcagggattatgatggttctattgtcgactgtgacgaatttgtcgaatgtcagtcgtttattccaagtgttacttcccttttcttttaattttttagatcaaacattgaatttatttgtaggattcttgttattaggtttagctcgaggcatttctatgaaagtgaaaaaagcttattggcctacaattattttactaggattttgtattgtaaatacggtggcacgaacgacttcgtggcagttgattgctgtttatgctgttattttattggcggttattttggctcgtaaagaattttatcgtgaaaagtttgtttattcatggggcgctttaacggtagatagtattttgtttggctgcttgtttatcggttatgcggttgctggctattacgccgcacgaccagctggtggcaatcaagttatcaatcactttttgttgtttccgtcagatgatgtttggtttaacggattgattggattaagtatttccttgattggtttattctttttgtatcaatatttagccgaaacaactgttactttaggtgagggatttgagaaagcgcggttgacacgctttttggaaaaatttggtggcaacgaaggcagtcaatttttgtatttaaaggattatggtcatttttattaccaagaagaaggcgaagatcaagtactttttgggtttcaaatgaagtttaataaatgctttgtcttggcggatccgattgggcaacgagagaaatggacagcggcgacactggcgtttatggatcaagctgatttgttaggttatcaattagttttttatcgtatttcggaagaatatgttatgaatcttcacgattgcggctttgaatttatgaaagttggggaagaaggcttgattcaatttgatgagccgtcaacagtgaatcaaacagcctggacggaaacagtgactgaaaaaatagcagcggaagcagcggattttcagtttgaattttatcccgaaacgattagtgatgccttatatcaagagttagaacgagtttctgcggactggtcacggaatcaaaaagagcgctactttattggtggacggttggatcccgagtacttgaaatgcagtagcgtgggcttggtgagacagaaacaaacggtcatcggtttcattactggaaaagaaatggaaaaaggcaaaagtatttcgtatgatttgttacgtattcgttcagacgcacctgcttttactagagaatatttgttcactcattttattgaaacctatcaacagcagggctatcaattaattgatattgggatggcgccgttggctaacgtaggggagagcaagtactctttcttaaaagaacgctttgttaatattttttacaagtatagttatcaaatttatgcgtttcaagatacacgcaagcgcaaagaacaatatgtcactagttggcaaccacgttattttgcttatcctaagcggaccagcgtactctttgcttttgtgcaactttccttgttgattacgaaaggaagacatcaaagtgtttcgcttgtggaagaagcaatgactgaaatttaaaaaaatcacgcgatgacttagccatcgcgtgattttttatttgtcttcttttttacggtttcgtctagcaggaatcaaggttacgtaggcaacgaaaccaccagtacatagaacgaataacacgatgccaggaatcaatccttctggtaaataagagaactgaatagtatgggttccagcgctgacaggaacgcttagaaaggcatctttaaaggcttttggggtaacttttttgccatcaattttgacacgccaacctttgtcataaggaattgtagtgacgagtacttgatctttgtcggcggtaaaggtacctgaagcagagcgtttgccagttgttaaatcaacgcctttttcttgcacggcggaaatggctttttcaaatgcattggtatttaagccaaccacttgcggctgaacaaaacttactgctttggttccataaaaacttactttgaagttaacggttgtatctttgggatagtaacctaagttataatattggccagtaatgccaatttgtgattgctgacttgagccgttcacggtgaccgtcgcagtggaactttccaattgagcaaaatccgttgggaataaactcaaataagcttgcgtattggcgggcacattgactgtataagaaatctctttggctacgttatgttgtttctccgtaaaagttacgccagctgtattttgcgtaattgtcacgttattttgaagcgtcatcgttggttgataaaaggtaaaataccgttcattagtattggctaaagcatttagtaaatttgtttgactacctaaattatcattgagaggttgccggacattgtaaatctctttgtctgctaaaaatcctaacggcaaagcattttcgttacgataaagctgatatttaccagcagcagcttgtcgctcaaagccgaatttcattggattgttttcagcaatattgtatttaatgcccatcaaagcatccattaacaaggtattattttggtaacgaatatttaaattcgtgcctcgtgagcggaaacctaaggcgtttaggtatgttgaagaatgtcggttccgtacggaagaaaacatgctaatgccactgtagccatagttaatgccgtcattggccgaaacaccatttaaattttccaagcggtaaaaggtatcattttctttttttgtttgatcgactagattttttaagtcaggataaggctcagaatacaagctgcgtgatgcgtagttccaatcatctaaaataccagtgaccatcgcccgtgtgttaatgattgcttcaccagaaacgagcagcaataacaaaatcactaagtattgcataggcgcttttttcaattgataaaaagcaatcccgaaaaagtataatagtaaaaaagttgccgttaatacgaaagaggttaaagtcacatacgtataactagtagcaccttttgtgcccattgcaagagcaaaaattgctaaaagaatcaaaatcaagccgcttaagacaccgagatcatccttttcaaatttctcccaaccataacctgcaagcaaaataactaagaatgaaaagaggaaactatagcggaaaagaaacatgttcggcgcatgcataccgtgccagaataaatttaagggcgtgatgtaaaagctagcaatcaataggacaaacaaactgccaaaaagtagtttgtttttcaatggaacttctttcgtaacgaaatagaagagacaaaaaatcaaaggcaacaacccaatgtaaataaaaggaatggacccatatttggttgtatcgtaaacgccaatcatatttttcataataatatctaaaaaggcagtcgcttctgttttaaaggttgtaatttcagaaagagtttcaccattggttcgtaaatctaagacagcaggtaagaccataatcatggatgctccaccagctaaaagagaagtagtaaaatacgcaacgattcgagatttatatcgttgccagtctgtaaacgttcgtgcaaaatagtacaggaaggaaaacaacccaatcataaagccaaaataataatttgtaatgaaaagcaagaaataactgacaaacaataatgtcggttttcgttggtccattaaacgatgaattcctaaaattacgagtggcagataaataaaggcatccagccacataattaattctgaatgggccacaatgaaggacattagcgcataagacacacttaaagtcacatgggaccatttaggaatcttaaaggtttgttttgccaagaaccaaaaactcaagccagcactcccaattttcaacaacgttaggaaatagagcgcatcaggcatgttttgattgttaaagaaaaagacgagcggcgtaaataagccaccaagataataggaaattaaggacaagtagtttagtcccaaagaagcattccacgtatagaaaagactttgttttccatgaagaacattgttaaagcttgcgtgaaaatttgaaaattgagaaaaggcatcgctggctaaaacactgcgactacttcctggataaatcccaatactcaaatagataattgccataattaaaaatggaatgaagraactgsctaacatataaggccagttgttttttaaaaactgcctacttttatttttcataaata

SEQ ID NO: 441 - DNA, 1087 bp; double-stranded, linear
atgaattagagcctttaatcgagttgggcgtaactggcctccggntncnntagcggcattacgatagaacaaatggctcatgcttcacataagattgatataggattgaatgctagtaccattacactggaagaagtggctgagttaaaggctcaccaagcggacttttctcgcttagaagcttggcataattattatccaagacctgaaaccggcattggaacaacattttttaatgaaaagaaccgctggcttaaagaattaggcttacaagtttttacttttgtaccaggagatgggcaaacaagaggcccaatttttgctggtttaccaacattagaaaaacatcgggggcaaaatcctttcgccgctgccgttggtttgatggctgatccttatgtcgatgctgtttatattggtgatcctacaattagtgagcgaaccatggctcaatttggttattatcaccaaactaatcaatttctgttagaagtagcacctagcgagagccgctatttgaagcgaatacttgggactcataccaatcgtttagatgctgcaagagatgttttgcgaagtgaattatcaagaacgagtgaaatgttcagaaaagatgaaattgcaacgattgagtcagagcagactgaagcacgtccagtgggaaccgtaacgattgataatgaaaaatatggtcgctatatgggagaaattcaagtcacacttgtnggacttgccgaaagatgaaaaagtcaatacgattacacgaattattgaaaaagatcmaacgatattgccgttaatccaaggcaggcnatcaatttacgctagtcacggaaggnacgatagagaatgaatttagaaaacttaacaactgaacgtagaaatgaaaatacaatgggcttagatgagatgagtgtcaaagaagctttacaaaaaatgaatcaagaagaccaaaaagttgcaatggcagtgggtcaagaattagcagccattgaaccagtggtagaagccatccatcaaaagcttcaatcaagggggccgcttgattctccntgggccctgtaccaattggccggtaaggggccta

SEQ ID NO: 442 - DNA, 762 bp; double-stranded, linear
attgtgattttttcaattcagattcttcatcgttaagatgtcattaaagacactgactaagtaatcgktgactgtttctaaattaggttccattctgtgcaccatccatatactttgattatcaaaacatttgatgttcaaactatatcgtaaataagcaaagaatgcaagagaattttctatatttttaatgaaatattcttcaaatatttcaaaaaaggcgcattttcaagggacgaggcttttaaaaaaaggatcaattactttgatacccaaactattttcacagaaaaaggaaagaagtgcaactaaaaagcatcactggcactcccctgattgagaagtgccagtgatttttgttatataattcttaaattcccactaagctattgctacaacttgactggataatacgagaagagagtgaaccagaagctttggtgcttctactccactcccttattaaaatgtaggacgattaattattgaattaagtcgtaaatttccattgctacaatatcgatgttatcgaattgatagctttggtgcgtatcagattctgttaattcaaatgtttctgttgatttatcaaaacttacaatacatttctctacgccttcacgttcaaagcggcgtacttgtacttcattatctgctgcttcgatcattgcttccagtctcttaataatcgccacaagttgtgaatgtttcatcagtgggcctccttttgcaaactagttctgtaccattgtaacaaaacat

SEQ ID NO: 443 - DNA, 2012 bp; double-stranded, linear
cannacacctgcttctgttgnataaggaatgattatcttggacaaaatccaaagtctaacccatgttctgcaaatttagctttggaataactntctgtaaaaaagccacgatgatccaccgaaaacatccatttcgataattttgacatcttgtaattttgtatcaataactttcacgtttcttcgctcctattctgctgctaaacgtagcaagtattggccgtagccatttttcttcaatggttgtgccaattctaccaattgttcttttgtaatatagcccattcgataagsaatttcttccaaacaagsgacttttaaattttgacgtttttcaatkgtttcaataaatgktgacgcttctaataaggattcgtgtgtgcctgkatctaaccaagcaaagccacggcccattacctcaacagaaagtttatttttttcaaggtagactttattaacgtctgttatttctaattccccacgttctgacggtttgatcccttttgcaatttcaaccacttcattgtcgtaaaaatacaaacctgtcactgcgtawttkgacttcggttgtgctggtttttcttcaatagaaagcgcccgcatctcttcatcaaattctaccacaccgaaacgctctggatcatttacatggtaaccaaagactgttgcccctgattctttagaagccgctcgttgcaacatttttgataagccgccaccataataaatattgtcccctaaaactaagcagacactgtcatcaccaataaattcttcaccaataataaatgcttgcgccaaaccatctgggctttcttgtaccgcgtattcgatatgaatgcctaaatcatggccatcgccgaataagctttcaaaacgtggtgtatcttctggtgtagagataatcaaaatttcattaattcccgccaacattaacgttgacattgggtaataaatcattggtttgtcgtaaattggcattaattgttttgatgttgcttttgttaacggatataagcgtgtcccgcttccgcctgctaaaataattcctttcatgaacaatctccttaaatacttctatttttagtttctataaaaccaaatatccttccctattatcgcattaagcatagggtttgtcatgttttttacgtaaattttacaaatctgtaaaagtttagcgttgttcctttaaacgctgatgtaaagcttttaataaattcacacgccaatttaatttttgttggaaacttgttttggtaataatagggctgacattcgctccatgtcttcggtaaagcactaatggttctttaatgagacccgtttgctttttccgtgcagctaataagccaatccacatatcatgcataggaacttctggcggaatgggtaaaatgacgtttttcatctcttgacgaaaggccatacctgccccaatatagccactttttatcgcatttcgccaaaaccctggtttgacttttcgaaacttaaaataagagggattggtaacttgtaaatccgcatcaacaattttcaagtcactaataaccacttggatgtcagggtgcgtttcaaaatattctgtcactgttgttactttatttggcaaccaaacgtcatcttgatctgctaaaaatatcacttcgcctttcgtatgcgtaagcgcaaatgcaaaattagcaatcactccttgccctggaccttgtaacaattgaatttggggataattcgctgcatacgttctcaaaatttccaacgtatgatcagtagaaccatcatctgaaataattagttcatcytcttcactgacytgtaaaagaatactatctaattgttccgcgagatatttttctccattatatgtcgcaatacaaactgagatcatagattatcctttcatgaacttgagaaattctgccaatgtttgccgccaaatttggcgatttttgacagttanaaatngcttactactgcgtaaaaatagatggcgtcgatgngggaaaact

SEQ ID NO: 444 - DNA, 5308 bp; double-stranded, linear
gacattggtgttatattacttacaagttgttttttcattggtttttatcagggtcctgttctgataaaagttagtgaagagaccttcactaacgtaacgactcgccgtgctagacaccgagacggtacgttttttttattggttaaaatagctgccgcttgacatcatcgcgtcatgcggttttttttgaaaataagtattgtgggcgctatttattttgaatttatgctaaaatgaacacgattgatatttgaggagctgaagatagttgacgaaccatattgttttatttgaaccacaaattccagcaaatactggaaatattgcacggacatgtgcagcgacgaatacaccgttgcatttaattgaacctttaggattttcaacagatgataaacacttaaaacgtgccggattagattattggaatgatgtaaatattacgtatcataaagattcggctgcctttttagcccatgtggcaggcaaacacttgcatttagtaaccaaatttgctcaccaaacatacagtgaggtcaattataatgatggcgaagaccattatttcctttttggaaaagaaacaacgggcttaccagaaacgtttatgcgagaaaacgaagaaaagtgtatccgaattcctatgaacgatgaacatgtgcgctcattgaatctttctaacactgccgcactaattgtttatgaagccttacgtcagcaaaattttccgaacttagaactgacgcatcattatgaaaatgataaattggattaaaaaaagttaaaacagcagcgcttttttcaaaaatgtcagaagaaagtggttttatttttactgttgcccaatttccaagcctagaacaaaaaacaatttagatttttgttctaggcttattttgcttggattactagaaacttccatggatattttcgcagggaagtgataaactagaaagacatatgaagagataaagaagtttggagaagttacatgaaattatattttacacgacatggaaaaactgaatggaatcaacagaaacgatttcaaggaatgacaggagattcgccgttattaccaactagttatgacgaaattaaacaattaggccaatatttacaagatattccgtttgaaaaaatttattctagtccgctattacgtgccaaaaatactgcgcggggaattcaacaagaattgactcatccagttgaaattgtttatacagataccttaaaagaattaggtttaggtcgtctagaaggacaatatattgaagaaatgcgtaatttttatggagaagaattagatcatttacggcatcgtttagatttgtatgatccaacaatttttgatggtgaaccaatcgagcaagcgattcaacggatttcagaaacagttgctgaagcggcgaaacagcacgaaggtccagttctatttgtcggacacggagcagcgctgacggcggcaatccaagcgatggctggtaaaccattatcagaattacggacaatgggcgggctgttaaacaatagcctctcaatccttgaaaccaaagaggcatcaaggaacatgccgtacgacttaacgttatggaatgatacgtcttttttagctaaagaaaaagcacaataagcacacaacagaaaggagggcttgtagtggtaacactttttggtgaggacgaagaaaaagcctttattgttggaactgtacaagcaatcttttttgaaaatcccagtaatttttataaagtcgttcttgtaaatgtgaccgatacaaatacagattatttagaaaaagaaattgtagtaactggaagttttggccaagttcaagaagaggaaccctatcgtttctttggtcattttgtggaccatcctcgttatggcagacagtttcaggtggatagttatcagcaagaaagaccgacttcggctagtggggtggttaactatttatcaagtgacaaatttcctggcattggtaaacgaaccgctgaaaaaattgttgaagtattaggggaaagtgcgattgaccgaattattgatgatcctagtgttttggaagaagttactgttttaaatgaaaaaaaacgtcaagtaatcgtcgaaacaattcgcttgaatcacgggatggagcaagtgattgtgggactaaatcgatacggctttggtagtcagttagctttttcaatttatcaaacctatcaagaagaaaccctttctgtgattcaagaaaatccctatcagttagttgaagatattgagggagtcggatttaaacgagcggacaatattgctgaacaaatcggcattcaggcggattctgctgttcgaattcgagcggcgattttacatgaagtgtttgaacactctattcgttcaggcaatacgtatgttcaagcagatgttttgttagaagaagcgattcggaccttggaagcaagtcgcccagtggaaatctcacctgatcaagtggccaatgaaatcattacgttagtcgaacatggaaaaatccaacaagaagagactaaactttttgagaacagtctctatttttctgaatggggcattggtacttcgattcaacgtttactttctcgtaaaaaagaaattcattatgaggaagaagaagtccaaaaaaatatccgaatgattgagaaacgtttaaatattcagtatggcgactcgcaacaagcagcgattgaagaagcgattaaatcgccgttatttattttaactggagggcccggaacagggaaaacaactgttatcaatgggattgtctcgttgtttgcggaactaaatggcctttcattagatctcaaagactatacgcaggagatgtttccaatcttgctagcggcgccaactgggcgagcagcgaaacgtatgaacgaaacgacaggtttacctgcaagtaccatccaccgtttgttaggcttgacaggtcgtgaaaaaaatccgagtttaaccgccaaagaattagaaggtggtttgctaattgtagatgaaatgtccatggtggatacttggttagccaatacgttattaaaagctattccgacaaacatgcaagtgatttttgttggtgataaggatcagctaccgtctgtcggtccaggtcaagtcttacatgacttattgcaaattaacgaaattcccaaatgtgagctaaacgaaatttatcgtcaaggagacggttcaagtattattcctcttgcccatgaaattaaagaaggaaagttgcctgctgattttcaaaaaaatcaaaaggatcgctcgttctttgcaagtgatattggtcatattgaagaatacattcgacaaatcgtcacaaaggcaaaagcaaaagggtttacgccacaagatatccaagttttagcgccaatgtatcgtggcgcagccggcattgatgccttgaataagatgatgcaagaaatcttcaatccaaatgatggtaagaaaaaagaagtcaaatggaatgacaccgtctatcggatcggggacaaagttttgcaactagtcaatacgccagaattaaatgtgttcaatggagatatgggagaaatcgtcggaattactttagccaaagactcagaggacaaagtggacgagttggttttacagtttgataataatgaagtaacgtataaaagaaatgaatggaataaaattacgctatcgtattgttgttcgattcataaagcgcaaggtagtgaattccgcatggtgttactgccaatggttcatcagtatagccgaatgctgcaacgaaatttgctgtatacagcagtgacacgtagtaaagaattattaattctactaggtgaggtttctgcttttgaaacatgtgtcaaaaacgaatcggctagtcgcatgacgatgctaaaagaacgaatcgtgaacgcagaacaaatgaccttaacgactagaactcagttagaagcctatgaagaaggtttaacggcagaccatccatttactgaaacggaaacaaaagctgtcttttatgaaactgaacagcaatcaacgaaagccgatcagatcaaagamacagacgagcaattagttgacacaacggtacaagaggtttcactatttgctgatgaaggggaagagtcaacctcaccagctgaaccacagaaagaagaacaattacctgaaaatcctgtattgtcaattcaagaaattcaagaaaataaaattaatccaatgattggtatggctggaaccactccatatcagtttatgtgaaaataaataattaattatgtttgtctgtttaagaagtcaatttattttatttgattcaatattattaaatagttttgaatgtttgtttaagctttgcaacagttttacaaaaaaataaaaaagtgagacgatgaataaatattttttacagatatttattcatcacttaaactgatagagaggaattaattgtaaaaatgaaacgaaaaagtctaaaatcatttatatatgtaagcgcattacttgtttttttgagtggttttgttggtgttagtttattcgttaagtcagaagtagtagaggctacaacgataggtgatgactatcctgttaaatggaaaaatcttcctttaggcggggcgattgatgattggagaatgtatactagatattgtacctcatttgtcgcttatagattaagcacagctaataactttgagcttccaagtggctttggaaatgctgatcgttggggaacagaagcaatggcgagaggttacaaagtagataagaatcctaaagtaggatcggtggcttggtggacatctacgcatgttgcgtgggtagcagaagtatctggcgacaatgttaaagttgaagagtacaattatggattcgatggtaaatacaatactcgttggattaacaagaattccgccaatggatacattcattttaaagatatgccacaaacacctgtaggttggtataacaacggtcactatgattattactattatgcagacggaacaaaggcgattggtctaacttgggtaggtacgaaacgctataatttcgataaaaatggtgccatgtacaagaatgcttggacaaacagcgwtaaatattcatattatagtacatcagatggctcattagcggttggtttaacttgggtaggtacgaaacgctataattttgataaanatggtgccatgtacaagaatgcttggacaaacagcgtaaatattcatattatagtacatcagatggctcattagcggttggtttaacttgggtaggtacgaaacgctataattttgataaa

SEQ ID NO: 445 - DNA, 745 bp; double-stranded, linear
gctaagcttcctgttaaaaccacgttattcggagattttgttagttttcttttcatatgttttcacctcatctactaaattttacactagaaaggctgattcgtcagcccatctagcttaaaattgttaattatttatccgtatcttttaggaaaatacttcccgttgttgtagaagcattaatttgagccattgattcttccagtacacgtctaaaatgtaattgttgattgccgcgatctttcttttcacgaacaacttcaatatctgttaaacggctgttaatactacctaaattagttttcacttgcccttcaacacctaagtcatttggcaaggccaatttgatattcccatttgcagagcttgcttcaacacggcgaacgttttttctttagctgtaatgcggatatctccattaatcagagagacacttagactttctggtgccgcggaaatagacacatcaccattgactgtttcaataatgttatctaaaatcgttccttctaggactttaatttcaccattcacaccttcaatttctaacatagttgcatcaattttnttaaacgtaatcgtcccattcgttgattttgtgtaaacatctttcgctgttaactcttctactaagacatttccgtttaataatttaacagatacatgatcgtaagtgcgttttggtaaatagaacgttaaatctgctttcacccgtttgtttggcactgggaaagaaatcgttcac

SEQ ID NO: 446 - DNA, 445 bp; double-stranded, linear
tgggtacgggccccccctcgagtttttttttttttttttttcttttaaagcatttatttagaaaaataaccgttccctgcccgccttgctctgtgccatgggacttgagcatctttcttaatactcttctgcattgggcctgcaacccacagtggtggggtccagcacacgcccctcgaaacgctgcggcactgctgggaggcctcacgcccttccagtcgtgacagttcccgtgttcactccttgtccaggcctctgtctccgggtctccaggtggacaggggcctctgcgggatgggcgcagctctgccacagtctgtgtgcccctcccgargctctgctctccccgcatcsgaagctcarggctggaarcgcggggarctgacatgargttggtggaatgcstkggcgctgtacaccacctcsgggggcgaggcttcttgcn

SEQ ID NO: 447 - DNA, 1421 bp; double-stranded, linear
tgatgtatgtttcgtatattccgcaaatttatggaaatttacatggggaaaaaggcaatccgacgcaaccattagtggcaatgattaattgtattttttggacgattcatgggttatatggagacgatggagaaacacgagataagtccattatttttgctaatgtgcccggaattatttttggytttyttgcgtttattacagcattatagtttccgacgaattggaaagtattccaattctgtacataaaaaagagcgggggaaatttcccacgcttgaagaattaaatctttttcaattgtttgtaattaataacaatcacaccattgctgtgcaccattaagtgattgtttttttgcgtttcgtcaatttcgacgacagcggcattttttaattgtttcgtaacacgcctgtttgtggctgtccgtgaacaagaaaagtaacakgggkgycaacggcgaaatccttaccagcatccgatggaacaacaggagtaaccataccattaaaatttgacatacaaaaaaccatcctttcttgatatctctattataccacattttcagaaaaaagtttgtaaagtcgctatttggcttattttaaagagattttgcataaataaataacaaacagactttacaaataaagtagaaagtcctataatagatttgtttcaggccagcttagctcagttggtagagcaacgcactcgtaacgcgtaggtcgtaggttcgaaccctatagctggcatagattgaaaagacagatacaccaagccgtaaaggtaataggtatatctgtcttttttgtgttttgaaagttttcgctgcctaaaattgcctacttattaaaaattagtatttaaaacatgttattttatagctcgaaaatatcataattatcaaatttatcgctcattgatttttgagaattagggtataaatgaccataagtatcaattgttgtagtaattgaagaatgacctaatcgttcttttatagtagtattcttttcgttattgtgaataagaagagctacgtgtgaatgtctaaagtcgtgtaatcttataggtttaaggttcaagttgttttttacaattattttttttatttgtttagagtaataatcgctcgaagggtgtttttcactgtattgaaaaacaagtaatttgtcactatcaatattttgaaaattatctattagtaattttggttgtatttcttgccatttttttaacatggcggtaatttttgagttgatagtaatatatctgttgctgctttccgtttttggtgtggtagttacgtaattaccattaattagtttagcacttttatttatacggactgtttgattataaaaatcaatgtcgcnccacgttaaagcaatcatgnctcctggcacgcagtcctggaaaaa

SEQ ID NO: 448 - DNA, 787 bp; double-stranded, linear
aacatgtaaacaaatcgtacagataacacgcaagttgcgtgtcgagagagaggcggtttctattcttatagaaactgcttctatttttttacgaaaaaatgaaaactatagaggtgattaaatggaacaaaanaacgtacgattattccctgccgttttagcgacaggaattatgtcttttgctggcgtattaattgaaacagcaatgaatgtaacctttccgacattaacaaaggaatttggtgtttccaccggtaccgtgcagtgggtgacaacgatttatttattagttatttctatcatggtgcccttatccaattatttattaaaaacctattcgttaagacgcttatttattgttgcgaatcttttctttttgattggtttagcgattgatgtctattcgccatctttcagtatcttgttattaggccgactcttccaaggggctagcactgggattgctttgccactgatgtttcatattattttgaactttaccccgctggaaaaacgaggaacgatgatgggggtaggcacattgaccacttcaattgctccagccattggtccaacgtatggtggaatcttaacatcttccctgtcttggcacgccatctttttatyctnaatncctatttactgcttycttkgttwatgggcttatctgctatccagaaatacctgtnaaaaaaaccaccactctgrattggtagttaatgggatgcccygtaatagtggttgtgaggtttaagnaaatggccatgttggcggcttcactctgcag

SEQ ID NO: 449 - DNA, 901 bp; double-stranded, linear
ttttacctgcaccattcggaccaactaatccataaattttccctacttctaaatctaattgatcaacctttaaattgaatgtatcacttacttttttatataaattatttatatttattgtttgcattttgcaattcagtcccttcttgacaatgaaataagtgaaagtaatgtagttaacacgaaccaaaaacaaactacaataatattagaaacattaacagtattctgttcataaaacagtgatcttatcaaattactcgatggaacaaatggtaaaaattcaaaaaagttcactaaagcagaaggcaatctatctgttggataagtaataggcgagaataaaagtccacctatcataattatctgagttggctaatcctactacattaggtgttaaccaatatgccaaagcaaaacctatagagatcmtacataattgaattagactaagaatagcyagggccttcattgagaatcyaatttggacatcgaatcttaaatatgccgctaaaaatgacataaacaccccaggtagtgaggccattccccaaattataaagtcggaaattaatatgttcaaccgagaaactggcaatgtcctttgatagtccacaatgccctcctgttttgctgtacttactatttgagcagcaagaacgcaccctaccgcaataatcccaagagtagttgctccagatgacagatagatagctgtctgattattcacatctggtattagaagtgctaacccgtagacaattgctaatgatagaaatacttgagttaatgtaaaaacaggcaataagtatttaatgtcttaataaactccaccctactaaaggcaataatccttantccatgatngctctataatttgnatcatttccacnattaactc

SEQ ID NO: 450 - DNA, 4239 bp; double-stranded, linear
gaatacgaatgatactgacacttnatgagatcaaagaacgtgtgaaacctgtagctgaaaaacacaatgttccagtaatctacatttttggttcctatgctagaagcgaagcaaaagaaacaagcgatattgattttgctgtagacataactggagaagctgatgaagaagaagcttactggaatytatatggagatttttttgaagagttgaaagaagcggtaggacatgatattgatttagtcgaattagagacattatttgattcacaagataaaccagaaagaaaagctttgcttgaaaatattttgaaggagcgtgtaaaagtatttgaaagatagtacagaaaaagatttgcgtgttctaaaagggacgttaatctatatagaagatattgaggaaacactcaatcgttgtggaagacagtatgaggtcttttatcacgatagggtgttttttaatgccataggaatggctttaatgcaagttggagaactaggaacaggaagcaatggattatcggtagaatttaaagagaaaaattcagataaagtagactggaataaattaaagaaattaagaaatatgtttgcacattcgtatgattcaatgaatgagcgatttattttccgcatggcaacaatgtttattccggtgtacaaagaattttgtatacaagcaatagcagaattgcaaaagagacgaggtaaataaatgttaaaaaaattatttagatatagaggaaggcgtattcgttattcttcaagaaacctgttggcactctatcgagtgttattttttatgccaattttagcttgtttagggtattttgttggctataaatggatttatcctttatatctttcaaatccgcctgattggaaaatatacattgtgccagcgttgataattgtaggtatttctataggtgcaattgtgctaattacattgcttattaaagcttcaattattaattcggggtatttttctaaagtggaacaacgtcaagtattagcacatatgattattgacaacgggtattacacaaaaaaacaagtgaaaagtwstgayggyaaaacaaragaaaaaatcaagtttccaaaaatttattataagtctgcaaaaaatagtattttygtttcatttgaaacagcrggtaataaatttcaggaaaaatttgaaaccattggtggctttttggaaacagcgtttcatgcggacaatttaaataagattgatgaaaaaggctttataacctatgaattagcttctgacgtttacaataagcgtatttggataaaggatatgcaagcggacaaaggaaaggttcaattaatgaaagggttatattggtattttgataaagacccacatttattattaggtggcggaactggtggaggtaaaacctttaccattttatctctaatttatgcgctttgccgtgtgggtgaaatggaaatttgcgatcctaaaaattctgacttgatggcactaggtaagttaccaatgtttgcaggaaaagtgcatacaggaaaaacagatattgttaattgcttgaaaaatgcagttgaattaatgaatgcacgttttgaaatgatgaataatagccctgattacaaaatggggaaaaattatgcgtactatggtttaaagcctaagtttattgttattgatgaatttgcagcatttaaagcagaattagccaatgactattcaacagatggagaagttgatgagtatttaacgcaattgattttaaaagctcgtcagtgcggtatttttctaattgtcgctatgcaaagaccagatggtgaatttattaaaacggctttacgtgataattttatgtttcgaatgagtgttggccgtctatctgaaacaggratccttatgatttttggtgatgaaaacaaaaataaaaatttcaaatatgtagagaaaatcgatggacaaaaagtatacggtcgtgggtacgttgcacaaggcggttctgtcgcaagggaattttacagtccacaagtaccaacagattttgatttcattgaagaatttatcaaaatttctaaagaattaggttatgaagatgtgtcaaaagaagtgcaagaagaagtatctcaaaaaatagctaagcatgtagataaagaagcccttgcggaaattgatgaagagttagaaaaaggtcaagcaaagttagctaagttaagtgaaaaatttgagtaatgaggaaggagatttttattggattctagcgaaataatcaaacgtgttagagaacgagtgtatgttgaagtcaagaaacgatataaaaagcctgatttagatatacgtattcgtgacattctgtatgaacaatcagaaagctatgcaaaattagtgaggttttctaacggaaagcgaataaagaaattagctgaccctgtagagtttgaaaaatttatggaaaataggggggctaaaattgttgatgaagtgattgttggtttaaatgaaaaaggagaagtataaatggaatttaaaaatagtaatcaacttatggaatattgggaaacaaaagtaaaggaatttgaaaaagaacttaatagtggaatttcccaattgtcaaaagaagagagacaagaatcatgtgttgttgaagcaaaaawatatttagaagaaaaaagaaaatatgcgaataatcttcatgcgttattttatgttgaaggtagttatcagaattctaatgaagtagataggaaatttgatagagaattctatccagcgttttattcgtttttaagtgaaattgatattttagctcmttaatagraaggaatagtgattggtatgaacggtaaattgactcttgaagagttttataaaaaaatgtcttcggaaatttatagaaaagtgaaattaaaatacaagaaaaaagatttagatgataggtttagtcaggtattgcataattcgtcttttcgttttatttatagaaaatatcagaatcgtcctgatagtttacttacttatcaggaaagtgaaatggaattggataaaaatttagatggtcttgtcgatgaagtattaaaaggattaacaaatgttcgtcaaattgatttttcggaatatctggaaactgtcaaacgtgcaacatttaaacgctgttctgaaaaaacaacaaagtatttttctagtcaagattttaattctatttttagagaagaatgttttgactttgtgaagagtgcttttaaaagagattcagacggagaaagtgttatttgctgtgatgatttagatattttaatggaaatagtagtgaaggattgtgttgaaaaagttatgcgtgtaattaataagtaatgcagggggagcaggtgagtgaatatgttctcatttgaagaagtgctttttgaattagataatgctatttctttgaaaacgttgaaaaattgggcaaataaaattgaaaaattaacagatgttcgatttgttcgccaatacgctaaaaataaacagggtagaaactactcgtataaagtttttagtgtagaacaggttgaacagttaaagcaattggttcaattaaggaagcaaaatgtcccgctagatcaggcaatgattgaagtgtttatgtctgcagaagaaaaagaaaggcagcaagtaattactattgcaaaaatagattttgaagaaaataaagcaacggtgaaagaattaattgacttagtaaaagatgtcttgtcggataatgcagagataaaaaagcgactgaaagttctagaaatgaagcaaggaatgacaagagagtagactagtagttgctagggattgttgcgtgatttgtaggtggtgtaggggtggcgccctaaggcgcccgcccctacaccaccgtacgcaaaattagcaacgtatatcccaaatacttctagtcgtgaggtgggcttgtcccacctcaaaagtttctacccccgttttataacatgggggtagaatttaacataccatataaaaaagttacttaaacgctatgtcccacaagggattgagcgattttgtttttgtcacattttttgactaaagttgtcacatttttttggaagtaggtttaaagcagtgagaggtgttgatttaaagcgatatagaaaagagctaaaattaaaacagcaagaattggcaagtaaattaggaattgagcgttcgttaatttcaaaaatagaatctggaaaacgtgttatttctaaagagttagaacaaaag

SEQ ID NO: 451 - DNA, 1105 bp; double-stranded, linear
gcatattaatgtagtccatttctcgcttcctttcatggtgtatgcatctatagtatccgtttaaacaaattaaatcaagataatgataattaacaccttcttaatgtttaggacgtttcgattaaagtggttatcagagctttccgatagtagcggttataggaacgttcctataacgttggcaagcaatganccggaatatccttttgggatattccgggtngcttgttggggtttccccaagccccaggccgtccgcctgcgcgtccggcngaacacgcctttcggcgtggctttgcgctccctgcggtcgcttcctcctgcacatccgcgcaggagagggcggcgcaaaatgcgctgtcaggaggtttacgagattgacagaaaactttatttctctgaatcgttccctgtttcgttctttgtgatggtaagctgcccttgctggcatttcacagtgattttgtcgccgacagaaaatccggcctgttccagccattttccttgtaaaacaatctgcgtcggagcctgcttgtaattgccatgcccgtaacatacggtcagtttgcggttatccatccgtccccctttcccgcaacctgccggcatacgatttcaaatacattcccatcctcagtcctgacagtgagcagcccgttccgctcgtctgtgtccaggtcggcaatccccatcccctcgctgtcattcagtaaatcaaaaagcctgtccttgaaatagttcagttccatttttcagttcccctttcgtattttattgttgcttattagcgaatacttaaaaacaaatcctgccgccagtctgccggttaagcaaaacggatgctgcaaaaaatcagtgccgtcccggttggaaaggggcggcgcttttgcgtcaccgttccggtttggtctgttctttttcctgcgcctgctccggcggttccaatcctaaaatcttatccatgttgcggagtgcggtttgataagtaatcatatcctgccgcaagtcttgtactgttcatactgttcccgttttcttcagcagcgcggcatattccgctgaaagtgcgctactttgggaatagccttgccattcagggcatcaa

SEQ ID NO: 452 - DNA, 1095 bp; double-stranded, linear
cgccaattgaagccccacgaacaaaaggttcattttgtaaggctttgaaatttttggtttgtccggtgagcatgactccccaaataggtaatttttcgacttttttatttytatytkgttggataamcttttggcctycttgattgtcagcaaacaacggggatttttctaaggtttcaaaaaagtgttgcttgtcgttttcaggatcaaatatttcgttttgatcgtccatgcttaattgaaaaccataaggcagcgtaccagaaggaccttctgcttcattaaccgtttcggagtaaacatagagccaaactaagttgacattgctcggtaacattttgcggacttcttcatatggataaggtttatcaaaagaaatcgccacttccgctacttggttttccattttatctaattcacttaattcgtttttgataccaccatagtaattggtaatcgctgggttataaaaagatgctactttctgcttggtttgtcggttgtattcataaaaattcttagaagaataatagctaccaggatagacttcattccagtcaatcgaatttctgaaaaagctatatctgctacgtaaattactccactccaccgtgtaaccatcaatattttttgaacgattggtcacaacttcgcccccaaaaggcgaactattagcaattacttgggaatctaattgagtgtttggtgaagcaatcatttcttgatcattaattacttctagtagggtatgatagtttttcgtcgaaagtttatccattcccacaaaaaaaccgacaaacaatacggcaaaactaacaacggttatggcaccaatcacgataaattgttttcttttcgctttacgaatacttttttttaaatccacttctattcctccagttctttttttaatttttgacgtgtgcgatacaattttttgcgaacatttycaacmgataattcyaaaatcmacgcaatctcggcatacgataattgataataatatttcaaaagtactagttcttgttcctcatcttttaaggaatcgatcaataataataactcttgcccttccattttttctattgattgcac

SEQ ID NO: 453 - DNA, 5828 bp; double-stranded, linear
tgtcggggagatggagtttccttcctcagagcttttctattaccagcaacaacaatttgcttttccgattgatacttcaatgaatgtagaaattgtcaccaataaaaaggcattagctatcgttcgcaacaagaaaaaggaattaaaagatttagacaaccacgcttaccaatctgacaatgaaacgaattccaatgttttggatgctttggattccgttgatgaattggagaccaccttggatcagtcaaaagaatgatgaggaaaaatagactagtcaaaacaatgcctacaatccgtaaaattttccttttcatctccttcactccattctctcttgaaccggtgggcgagtatcaaaggcatggaagagttcttcaaagaccgggtgaacctgaaccacacctacccgaccatacaaatcctgcatcaagcattggccgttttccaaatctcgtaggcgtttttgattactttcatcttcttgatccaacccaaaaaattccaaagtcttcttgatttcatgaatatcggtactacgaaaagcaaatttcaatccgatattattcttcaagcgttcatccagtaaatcgtcactattttgcgtgacaaagtaaacaccggcattcatggcccgaccagcacgaacgagcttatttgaaagggtctttccttgagccacttgaagaaaactccaagcctcatccaggtccacaatcttgaagatttctcgattactatggataaaatccaaggcaaacgtggaaatgacgattagcatagagacacttagcaactccatcgtggtatattcttcaaaagtggtttctgcatctggtaaaaccaaatccgctacttgaatgatattcaactgcttatctaaactaattgattgggtaatcgaaccatctgagaaaagcaaatgggcaaaatcataatcggtaaaggactcgatatgatcggcgatattttccgcgactggagagttctcctttcgaagctcattaatgacttgcagcaatcctcgttgatcactttgggtaaccgtccgaatggctttgcgcaatactggaaacttctccccatcccgactggaaattcctgttaaaaaagtcaggatatcaattgctaaactttctgaatctttctttttcttcataatcacataaggatcaagtaagccttgattttctggtttactagtcaagttgagaatattgatttcatccgcaatttctggcaagttttctttccaaccacctcgttctccttttggatcgacaatcacagcttggccaccaaaaagaacagcatagtagaccaagagattgttactaaaggattttccgccaccaagagaaccaagaaaagccgcagctaatgcattggttactgagccctttactccttgtgaggctaatgcgggtttcaggtaaacattacgccccgtatccgcattgtagccaaagtaaatcccttccaactctcctaacatttgagtggcgccaaagccaagtcctgctaaaaagtcagatgttacatactggatatagtcattcatataccgtttactagctggtaggaattcttcatgtagccccatcgtatcgccaaagggccggactagtttcacattggtatcatcataaaaatcgaacacttcatcacaacggcgttttagttcatccactgattctgctctcacccggaccacatagctcaatttgtacatggattcttttgactgatccaaggtggtctccaattcatcaacggaatccaaagcatccaaaacattggaattcgtttcattgtcagattggtaagcgtggttgtctaaatcttttaattcctttttcttgttgcgaacgatagctaatgcctttttattggtgacaatttctacattcattgaagtatcaatcggaaaagcaaattgttgttgctggtaatagaaaagctctgaggaaggaaactccatctccccgacaatggtattaattgtcaaataggttacataagactcatgattctcatgttcaatccttaagtaacgaggtttctcttcaatcaaacaacgactgggacgtaataagtcatagcgtttcaccaaagtttctgatttcaattttttctttggtaactgaaaggcgtattcttcaaacggtgtacctttttcgccataaatatgttcaatcaagtaagtaagatcactgggattcactcgtctgactttgaatctccgcgctaatttactttccatcagtttttcaagcttggtatatcggcgaatttcttcatttgataatgaaacaaaatcgcccatcaaatgatgattgacctcatagataaactcttgaaagccggaaaagaaggattttttgagacttttcaaattcacttcttcatctgtagcaatcagtttgaaaccaataaaaaagcgataatcaatctgactatcgccaatcatggatactaatgcgtctgtctgtaaatcaatccgttgtaatgctatttctttgagtctacctataacttcctttttagatcgttcctgagtggcacgaatactactttctgtcgcaatttgtagcgcatgaatcttaccttctcgattttgggcaatcaattggcggaaattatcatgcaattgatatttttgttcaggagataagaaggaatagttataaggtattaactcataataagcaaaacactctccttcttgattaaaaacaagattattttcgatatacttaatcgggtacatagttcacactcctcactaaggtaatgggttcatcccatcgttttttctgttctttaactttttttcctgcaaaagtgaccttaaatcgtaaatgataactgataaaggatcgtaaaaatcccaatggtttcttgccatcaaaagtcttttgcgacataaaccaagtaatcgccaccgggatgccaaagtattttaaaaatgccccctctatcacagatagtggaggcacatgggcaaatacaatgacaaacagcaaggataaaacaaaccaagccatttggttaaaagttacaggaaaaggcagctgaaagtcattgattgcgtaaatgactttttcaactgcccagatactggtgtagctttttatttttttcattaactcatctccaaatatattgttttttaaattaaatattctgttataattaaaattaattagggggtagataagtttgaaacaagaagagcttaatcttaaattatatgagttgctattgaaaatccaaaatgaatctgacacactaacaaatgctgacatttcagaatcagacgcagatttttatggatatcttatctctaaagaattagtttataatttaaaaatagaacactattacagcggtccaaatatagatgctagccaagcaataatcacagataaaggatatgcatttattaatcaaattggtgaagcagataaacctattaaaatgaatcgtgagaatcgatacaaacaacttcagatatttctcaaacgattagatgaccatgacgctgatttaagaactccaaattatcgtgttcaagaaattgactactacgacttaattaaatatgctattgattcaaatctcgttaagggaattgctattcgatatgctagcaataaaccccatctttttttatctcaatttgcaagggttactacagagggatatgatgtattagatactccctatccaaaaaataatacacccggagcaaccatcagtaatacatacaatatctatggtggagatcaaaagggtgcgagttttggcagtaacaacacaaccaataataattaaaaggagagattagtattggactatcgaaccaaagaaaagaagttaaagcagctcttaaacttcatttatgatggaattacagttacgtcagacttattggagttatctcaacaagaattcgcatcattactggaaagcgcaacaaaatctggctacatccgaggtgcatccataacaaaaaccaaaatgtaccccataatttggactgacgatgatatgtcaaatggacgtaaagataagtgatttttttcggcaccagtaagaggtgccgtttttgatttattggatagtcccgacaaatttgtagtagatggtaatgcgcttttccttacccttgcggcagcgccccatacccggcgtttcgtaaatcgtgatccggtcaatcagttcgtgcagcatgaagcggtcgagtttttcaaagctggtgtatttttggataagggcggcgaagcggtcaatatcagcctttgcatcccgaaccttttccagtgctttttccagttctgcaacttttgctttcagtgkttcccgttccgtatcatagtccgcgataaacatcgcaaagatatggtcgggcagtttgccgctcatgttgtcctcgtaggtgcgtttcagtttcacatccaggtcagccagccgtttttttgctgatgcaaggtcacgcttcattgctgcggtctgtttctgctggtcggcgcatttcagttccattagcttttgcgcggctttctcggtgtcctcgctgaacagcctggcgttgcgccgaatgtcctcaagcacagcctgatgaaaggtgtcacggttgatgtagtgggcggagcaggctaaattcccaatcgcatgctgcgcccgcaggtataatagaagtatttctgctggctgactttcggaaccattgaagtgccgcagkttcgcagaagaacagtccggcaaataaatcgggttcgtctttggctttgatggtctttttccgcgcccccatacgtttctgcgcttcgtcaaacagttcccgtgatacaataggttcgtgcatattgggaacaacgatccagtcctttttgggtatcggttcccgctttttgctgcggtaagagggtgtgtactgcctgccctgcaccatgcttcctacatagatttcgtttttcagcatgaactgcacataagtccgtgtccagaaactgcggcgctcaaattcgccgtcacgttccgggttgtgcttgcggaaacgggtgtactctgttggagacaaaatcccctccctgttcaatgtcgttgcaatgctctttgaccctatcccggccgcacacatttcaaacatccgccggacaaccggcgcggtttcttcgttgataatcagtttgtgcttatcgtcaggatgccgcaggtagccgtaggggtcgagtgcgccaagatactcgccgcgctttgctttggtatgaagcgtagacttgattttcgtggaaatatctttggcgtacatatcgttcaggatgtgcttgaacggcgtaatatccatgctgctggtctggttcagggtgtcaacgccatcgttcagggcaatatagcgcacatgacgctcagggaagtaaatctcggtgtactgcccgcacatgatgtagttacggcccagacgtgagaggtctttggtaatgaccagattgatgcgccctttttcaatatcggcaatcatccgctgaaagccgggacggtcgaaatttgtacctgagaatccgtcgtcgatataggtgtcaacaatctcccagccttgtttctgcacatactcggccagcaatgccctctggttcccaatgctcatggattcatggtcggctccatcttcggaagaaagccggcaatagatagcggctcggtaattctgttgtycyctcataaaactgctcctwatcagtccgagaaacaacagggtttacgctcgtctgtcatctatantataccacattaaagcgttaagagtcaagctgacagccntn

SEQ ID NO: 454 - DNA, 1246 bp; double-stranded, linear
gcacttgacttgctgggctgccacttacagtgaacaagcacttaataaggtacttagacgagtaagctcattaaaatgtagggtttcctcatataaagtcctcactttggttaattgactatgtaaaaaacaaattgcttgtatctatattaaaaagagtgctacaagcaatattttaatcgtagttctagtaaatagcaatacttttatcaaaattcatgtttggaaatataatttgaaaaatatttttaactagcagaaaaacatttctaacaaaaagtattggctcaaagtaaagagatcgttttgttagaaatgagaaatggcaacataaaagttttctatttttctgcaattaagacagtttcaaaagtgaattcactaggaatatgattcgcaattgagtattcaaaaatatgcccattgcctaggtaagcaatttgttctgcacgcatcaggaaatcattatcggttaagtttaaatattttttttccaacggagaaggacgaatcccagaaatgctgacccgcgcactttgaattttttgatgcaattgttccgaaatatattgataaatggagactttcaattctttcattgtcaagttcggaattaaagcaacgggcatccaagtgtattcaataattgagggcacatcttcgataatccgtaagcgaataattttgtagactaactcttcttctgtaatacttaatttttcagtcacccaaggctcaggtacttctgttgcaaagcctaaaaccacggattcaacttttccatcgtaggttgagtaagtgccggttaacggagaaaatttagtaatggttcgattttgaaagtcttgaacaaagctgcccgagccacgtcgtctgacaacataaccttcttgcacaagcaaatgtaaggcttttgtaatggttagttcgctgacctgatatttttctgcaagaagacgaccttggggtaacttttggttaattggataaacacctgcttcaatatcctgttttatagctgcataaatttctttataacgtgtatttgtccgcatcagagtcctcctttatcaccagtatttctctcattataccatgaatttaacgtgttaaaactatatatttatttttaacgtaaccacttaataatcaagtacttaaataaaagtagttgacttattctttttaaaactatatagttttaaaagtaaacagaagaacttattgatctgattggtactttttg

SEQ ID NO: 455 - DNA, 2211 bp; double-stranded, linear
cagtttaggttggtcaagagtnattggacaccagttatttgaaaattggtggaataaatttcttccctgcttcgtcattatctacagccaaaacaagttggactttttccgttgttagtttcgacttttctaattgttcaagaacggttggcttttcttcctctttgacataagagccaatttcattggcaataagcgtagatactgcgccctttttaagtccattcgcacaaaataataccgcatctccaatcgtctctttttttaattcgtaataactcatgagatctataggcgcttcaaaaacaatgattttgattggcttttctgacgtagcttctgcaatttttggtggataccctacacgaacagtcaacccataatagccatttccccagacacgctttaaccgtcctcgttcgccatgtagcttcttattttcccaaataccttgtaaggcaacgcctttaattttttcttcaagaccaacgtgcttgaagactattactggttcactttgtccggtctctttatctgtatacgtggattgtgccatgaggttttgttcaaaaaagaaatcaatcgtttctcttgataacttacgttcctgaagcaagtaatcaatggtggcattttgttgtgtatgttctttcatataataatgaaagttcgtcggagtaggttctttcaacgtttcaatagcccctgcttctacggtctgtaaatactgcaatgcttcagcgtgtgtacactcttttatcacttgaacaagcttaatactcccaccaccaacttggcgagagttccaataaaaagaattcttcttaggggttaaaacaaaactatcgtgctctgaccaggtataactttgtccctgtcgtacaagtgttattcctaaactttctgcgacatccacaatactttttcgttcaattctctaacactttttgtcgttgtgcatgtgtcattggcattttctgttcctcctttttctattttctgaaataaaaaacgcacgtctttttaaacgtgtgtttcttctttcagttcacttgtaatttctccatggtcaataatatckgttgccgagattttatccaaaatagcttcttcatcagtcatatatcggcgccacgtataccacttatcatcagtcggtcctgttgctagttcatctgctcggtcatgctgaaaagcatagaattttttatctttaaaaacatgctcttttgatataaaaaccagacactcgtctcctccaataagcgcaacttcactcctgtcaatcaaatcgcgcccgtatttatctcgattttcggatcctccaccttgatttcctttattcatgctatgtttccgaatagataatgtttgtttccctgcacgcgcagacagatacttggtggtttcttcttcgtctccaccaaggtatagtaaacacgcacagccatttaaaatgttttgccacccattccgataaagcgtttgtaattggttcaaggactgtaaaacaatggtaaacgacatttctcgcttacgaaacgtggtcaacattttctcaaagtgaggaattcggccaatattggcaaattcgtcaattaagaagcggacatgtaggagttcttttccttcttctagtactcgttttcctaaacgtacttggtctgatttatttcgcaacacttctccgactgtcgcaaacatcaacgctgcaataaaattaaacgacgtattagtttcaggtatcgcaataaacaccgctgttttttcttcattccaggagtcaatatccatcgtgtctgtacgaatcatattgaccacttcttcatggtcaaaaacagagtaacgtgcagcagctatccctagaacgcttgctctcgtttcactctcatacaaattgttaaacaaggtccattgtcggtaagcgtagttgtcaggaatggcctcatttaactcctcaaaccattcttccactgggctaggtacattttyatcttttcgttttaggtgacgtaacatgtccgcaatcattcctaaatgtggcgtataatcatttctgcgaccgtcaaaccataaatacgcaataagagagcgaaccaataagccttcggcttttatccaaaaatcttccccggtcgttttttccccttcttttgttggcttcggtgacagcttctaaaaactcggtccacgtctaaatcngagtgcata

SEQ ID NO: 456 - DNA, 826 bp; double-stranded, linear
taccgattgaattcattgcttccgtttgcggagaatgtgtcaacacatatgataaaaccgtttgtaaaataactgatgctacagcgaaaacttttaaaaaatcgctgatattcagatttattggttgttctttactcatgtacgtcctctttctttcaataatttagcgtgtaagtaagcgctcggattaagaacttactcacacgctattcacgcttctttgatttacattgctagcgattcataattggctaacaagatgccgcgttcttcaatcgcttctttgacttcttgagacgttaatatttccacttcacgaattcgaggcatacaataccctgattgattttgtaaaatagtatcgataaacgcaggatgacaattgatttcaaagacctctccttcactacaaacaaccatatcaagcaattgcaagatggtttcagttgaaatcgccttgtcataaaattggtacaacatttcatctggcgtgcgaacatcctgatataactctaaatagtcttktgtttcaatacttcttgaggcgttacgtaaaggtaattgatatttgcgagcaagtgccaaagctacgcccaataactttttattttttccgtgaacattatgatgagaatcaatatgatcagggcgtctgccacttttcataaatgaaataatttgagcatcccattcgttataaacctcttctaaattgactttttcttcaaaaatcgattgatgccaaraataaccagcktcatctactaaggaagggaccatttctcgaggtaaaataggttttgcttggtncaatgtcaatgttaaa

SEQ ID NO: 457 - DNA, 1332 bp; double-stranded, linear
taagctagatgcgatagagttatatttaacaacagagttgtcctatcaagaagtagctaatcttctaaagattcgcaatccatcattgattgcgaattggcttagaacgtatcagaagtttggtatagagggactctctaaacagaaaggacgtccacctaccatgtctaaaaagaaacgaaatgaaccccaaccactaccaagtgaacgatctcaagtagagaaaytagaaaaagaaaatagaatgttaaaaaktgagaatgcctatttaaaagagttgagcagacygcgtttagaggacgaataaaaaatggacgaatcaaacgaattattcatagtttccaaggacaatttcgattaaaagttattctggaaaccttaaggtttccaaatatcacttacatgtactgacaaaaacgtctcgacagaacagctctaacacaaataatcgaagaagaaattcaagtgattcgtaaaaaaaacataggcattgtacaagaatttggataaatctaccttccaacaaattcttaacactaacttagtcacgagttagtgaaaagagtatcaatcttaacaaagttattcttgaaaagaacgggtatcttagttggtacctgttctttttatatgatagatattgaaatttaaggataaaatctttaaaatatggatatcttttaaagattttataattgaccttcttatgagagatatcttgttcaaaagaagggagctcctatctttttccaagttttaagtaggagtttttatatgtaatactttgcttagtttaaagctatcgtattatatgaagaaaatacttattaaggtatcatcaattatgaatgtaaaaaagaaaactatttttataaatnatttatataaaaagtattgcattaaaaaataggttgttttaaaataaagttgtcatcatagtatgactcttttcgatagaatctcctattggaaacgatatggattctttattgaaaaagaatgttggagtaatgattagtcaagtccagactcctgtgtaaaatgctatacaatgtttttaccatttctacttatcaaaattgatgtattttcttgaagaataaatccattcatcatgtaggtccataagaacggctccaattaagcgattggctgatgtttgattggggaagatgcgaataatcttttctcttctgcgtacttcttgattcagtcgttcaattagattggtactctttagtcgattgtgggaatttccttgtacggtatattgaaaggcgtcttcgaatccatcatccaatgatgcgcaanttttgaatattttggttgatc

SEQ ID NO: 458 - DNA, 6021 bp; double-stranded, linear
ctatataattaaagtattttagatcttaactaggatctaaaaactgtatataaaaaaccatctatactttacaaaaataatatttttggagttataaataatgaatgaattttaatagtaaattaaattttgttatacttcaagttctgggttgcatgtgcagaatgtgcaggtggctccagcaaattatwatwcmccmcamcaaatcgtgattggtggtgaggttgctgctgttgatcaagcgatgacacttctcaaagaagctggtgtgaagcgaatgattccgttaaatgtgagtggccctttccatacggcgctgttacaaccagcatcaaaaaaattggctcaggatttagcaaaattgaactttcaaacgatgcaaattcctgtcattagtaatacgactgccgaaattatgccccaagaggcaattcaagcgttattggaaaagcaagtcatgtctgcggtacgttttgaagacagtatcgaaacgatgaaggctatgaacgtaggaacgatgattgaagttggtccagggaaaacattaactggttttgttaaaaaaattgacaaaacaattgaaatgcaccgtgtggaagatgttgcaacattaacagaaacgttaacagcgcttactgggaggtaaaaaatggaattaacaggaaaaaacgtatttattactggaagcactcgtgggattggtaaagcagttgcgttagcttttgcgaaagagggcgccaatattgtcttaaacggtcggagtgagattacgccagaacaacgacaagaaattgaagcctttggggtaaaatgtattggcctttctggagatatttccgattttgatgcggcaggtgagatgattcaagcaacagttgaccaattaggctcgattgatattctggtgaataacgctgggattacgaatgacaaattattattacgaatgacaaaagaggattttaatgcctgtttagatattaacttggtaggaacttttaacatgacccagcaagcggttaaacgtatgatgaaacaacgaagtggtcggattattaatatggctagcgtttctggtttaatgggaaatgttggtcaagcaaactacgctgcgagtaaagccggtgtcgttggttttactaaatcggtggcacgagaagttgcgccgcgcggtattacctgcaatgcgattgcaccagggtttatccaaacagaaatgacggatgttttatcggaaaaagttaaaacacaaatgaatgcgcaaattcccttacaaacgtttgggcaagtcgaagatgtcgcagctacagcgattttcttagctaaaagtccctatattactgggcaagtcgtgaatgtcgatggcggcttagtcatgcacggataaacgaaaggagtcaaaaggatgaatcgagtagttattaccggttacggtgtcacctcgccgattggcaatgaacctgagacttttttagaaagtttgaaaacagggaaaaatggtatcggaccgattagtaaatttgatgttagtgaaacaggtgtcaccttagcagctgaagtgaaagactttccaatggaaaaatattttgttaaaaaagatggcaaacgcatggataagttttcgttatttggcatttatgcggccttagaagcaatggctatgagtggcttggataccagtcaactagatgtggatcggtttggcgttatggtgggttccggaattggtggtttggaaacaattcaaaatcaagtaattcggatgcacgacaaaggacctgaacgtgtggcaccgttatttattccaatggcgattggaaacatggtggcgggaaatattgctttacgtgttggtgccaaaggaatttgtacttcaacagtgacagcttgtgctagtgcaactcattcaattggggaagcgttccgcaatatcaaacatggctactccgatgtcattattgctggtggagcagaagcgcctattacagaaatcggtatttcaggatttgcttccttgaccgctttaacaaaggcgactgatccagaaaaagcctcaattccctttgataaagaacgtagtggatttgtgatgggagaaggagcgggtgtctttattttagaatcattagatcatgctctagaacgaggcgcaactattttaggtgaagtggttggctatggtgctaattgcgatgcctatcatatgacatcaccaacaccagatgggagcggcgcagcgaaagccatggtactagcaatggaagaagcggggatttctccagaaaaaattggctatattaacgcccatggaacaagcacacaagccaatgacagtgcagaatctaaagcaattgaattggctttaggtgatgccgcaaaaacggcgtatgtaagtagtacaaagagtatgacgggacatctcttaggcgccgctggtggaattgaaggaattgctaccctaaatgctttacaacatcaatttattccgccaaccattaatgtggaaaatcaagatgaagcaattacggtgaacgttgttttaaacgaaagcaaagagcataaatttgattatgctttaagtaactcgctaggctttggtggccacaatgcagttatttgcttaaaacgctgggaggattaacatgcagttagaagaagtaaaagcactattaacacaatttgatcaatcaactttaaccgaatttgatttacgagaaggctcgtttgaattatatatgaataaaaatacagtttctgggcgaagtgccgtagaaccagtggcgcaaccacaagaaacaccagtagccgctagtggtgtgtcagtgcctgttgaaacagtttctgtcgttgaagaaacgccaactaatacaccgacagccaatgaaaagacagaagaaattacgtcacctattgtaggaatcgtttatttacaaccagcaccagataaagagaactttgtcaaagtaggagacactgttaaaacgggtgacgttgtgtgtatcgttgaagcgatgaaattaatgaatgaaattacggcgacagttgacggtgtgattactgaaatattagtcaacaatgaagatgtggttgaatttggtcagccgctattccgagttgctaaaggagaataaaacatgaaattaacaattacagaaattcaagaaattttaccacatcgctatccctttttattattagatagtgttgaagaagtcattcccggggaacgcgttgtagcgaaaaagaatgtaacggttaatgagcaagtttttcaaggtcattttcctgggaatcctgttttgccaggagttttaattattgaatcgttggctcaagcaggcgccgtggcattactttcaatgcctgaattcaaagggaaaacggcatactttggtggattagataaagcaaaatttagacaraaggtaacaccaggcgacacattaattttagaggttgaacttttaaaagtccgcgcttctgctggaatgggtaaaggtgtggcaaaagttaatggaaaaaaagttgccgaggctgaattaacctttatgattggataggtgaaaaatgttttcgaaagtattaatcgcaaaccgcggagaaatcgctgttcgtattattcgtgcctgtcgcgaattaggcgttcaaacagttgctgtttactctgaagcggatcaagaagcgttacacacacagttagcagatgaagccatttgtattggaccggcgaaagcaactgattcttatttaaatgttcaagctgttttaagtgcagcgattgttaccaatgctgaagcgattcatccagggtttggtttcttatctgaaaatagtcaatttgcttcaatgtgcgaagaatgtaacattacttttatcggtcctaaagcagaaacgattgatgcaatgggcaataaaataaacgcacgtcaactgatgcaaaaagccaaggtacctgttattcctgggagtgatggcgtcattgattctgtcgaagaagcgttgacgattgctgaagaaattggttacccagtgatgttaaaggcagctgctggtggtggcggaaaaggaatccgaaaagttctttcaaaagaagagttaccgaaacactttacttcagcgcagcaagaagccaaagccgcatttggtaatgatgatatgtatttagaaaaaattatttatccagcacgtcatatcgaagtgcaaattttaggtgatcaatatgggcatgtgattcacttaggggaacgtgattgctcactacaaagaaataatcaaaaagtgttagaagaatcaccatcgattgctatttctgaagaaaagcgtcagatgttaggcgaaacggccgttcgagcggcacaagctgtgcattatgaaaatgccggaaccattgaatttttgatggatccagctggcgacttttatttcatggaaatgaatacccgcatccaagtcgaacatccagttacggaaatggtaacagggattgatttagtcaaagcacaattagaaattgcttcaggtgaacctttaggctatacccaagaggatgttatcatgagtgggcatgcgattgagtgccgaattaacgctgaaaatcctgcctttaattttgctccttcaccaggtaaaattcaaaatctcttgttgcctagtggtggaatgggcttgcgtgtagacagcgctatgtattcagggtattcaattccgccttattatgattcaatgattgcaaaagtcatcgtacatggtgaaaatcgttttgatgccttgatgaaaatgcaaagggctttaaatgaaattgtaacagaaggtattattacgaatgccgaattccaattagatttaattacacatgacaatgttttgacaggtgactatgacacaagctttttacaagaaacatttctaccaaattgggagccagaaagcaatcattaaagaaagaacgccgcaagagctgtgctcttgccgctaaaatacgaggagtaagcaaatggcattatttaaaaagaaaaattacattcgcattaatccaaatcgtgctcatgcaaatgatgcatcaaagaagccttctgttccagataatatgtgggcaaaatgcccttcttgtaagcgaacactgtatacaaaagaaatgggtgcagaaaaaatctgtccgcattgtggctatagttttcggattggtgcatgggaacgattagcgataaccgttgatgaaaaaagtttccacaattgggacagtgaattagtgacaaaagatccactaaattttcctggttatcttgaaaaaattgaaaaaatgcaagaaaaaactgggctagatgaagctgtcttaacgggagaagcaacaattgaaggacaagctgttgcaattggaatcatggacgctaattttatcatgggcagtatgggaacgattgttggtgaaaaaatcacacgcttgtttgagcgggcgacagaaaagcatttaccagtagtgattttcactgcatctggtggtgcccgtatgcaagaaggaattttttcattgatgcaaatggcgaaaatttcggccgctttgcaacggcataacaaagcaggcttgctgtatcttacggtattgactgatccaacgactggcggtgttaccgcaagttttgcgatggatggcgatattattttggcagagcctcagagtttaatcggttttgctggccgccgtgtaattgaacaaacgattcgtcaagagttgccagatgattttcaaaaggccgagtttcttttagaacatggttttgtagatcagattgtgccaagaaatcttttgcgtcaacgattgagcgacttgttacgtttacattctttggaagggtggcgctaacatggaaaagaaaacagccaatgatgttgttaccttggcaagagcccaagatcgtttgacaactttagaatatatagaagcaatttttgaggactttttagaatttcatggggatcgttactttgccgatgatttagctgtagtcggtggtgttgctactt

SEQ ID NO: 459 - DNA, 2813 bp; double-stranded, linear
ttttttaaaccgaacaattttggcaaaaaacgaaaaaagaattaacagaggggacacgatttatcgcaattggttatgggcccaatattggtacggcgaaagagtttgagacgaagtttacagaaacagttcgcttaccttcccaaggatttgaagtcgaagcctatatgcatgggccttatcttgaagcggataatacacatcttttgttttttattgaaaatcaaagtcctattcaagcacgtagccaagccttgaaaaattatctagccagttatgttggccaatgttacacaattacaacgcgttcaacgagagcatcaaatacgttagatttagcaagtgatgtcgaagaaaaaattagtcctttattgttagttattccatttcaatacttggcgcatcaagtagctacaagtaaaggaattgatttatctcaacggatttttgatgattttgattgtgtcctaaaaagtaaaatagcaaagaaagagggaaatcagccatgttaaaatttaatgaagaacaacaaatcaaagacatacgaggtgccttagccttgcgttcagatgttgaaaaagttgttgatcaagtttggacgaaaggatttgatgcggtttattatataggaatcggcggtacttatgcttcagcccatgcaagcagttacttatgcgaatggaaaaagtaatttaccaatctatgttcaacatgctgctgagtattacacaacaggcaataaacgtttaacagaaaaatcattcgtcatcttgtcttccgttactgggacaacacaagaagtggtgcaagccgttcaagaaatcaaaaaggtcggcgcaacgctatttggttttattgatgcaaaagatagtcttttagcagatttatgtgattatgtggtgacttatccagctccaggaactgagcaaatcaagttctttatggtagctgatcgtttaatgcaaaaaaacaacgaatttacagattacgaaaattattaccaagaattggaagaatatttgcctacaggtttagctgaagccgaaaaaagtgccgatgcgtttggcttagcttttgcggaaaaacatcgtcatgatagcattcactattttattggcgcagggaaccaatggggagcggtttattcttatgcaatgtgctattgggaagagcaaagttggcttcgttcaaaatcaattcatgcagcagagttcttacatggaacgctagaaattgtagatgaaactacgccagtaacgttgtttattggagaagacgagcagcgtccgttggcagaacgagtagcaaaattattgccgaaaatctgtgccaattatacaattattgattcgaaagcgtatgaacttccaggrattagtgaaaaatatcgtggccgagttgtttccatttctccctaatgcatgcggtaacgcaacgcattgatgcgcatgtagaaaaattaaattgtcacccattagagattcgtcgttattatcgtcaatttgattactaagacaaaatagcctctttttccagcaagcctgtggtagactgaagagagaatacttcagaaagtaggaaaaccaatgacaaaaccgaaaatctatacaatgacctttgccagtgtttacccgctatacatccaaaaagcagaacgtaaaaatcgaacgcaagcggaggttgacgaaattatttactggttaactggttatgatgaaaaaggcttgcaacaacaattggctcaaaaagtaacgatggaaacattttttgaagaagcacccaattttaatgaaaacgcccaattgatcaaaggcgtaatttgtggctatcgcgtggaagaaattgaagatcctttaatgcaaraaatccgttacctagataaattaatcgacgaattggccaagggaaaagcgatggaaaaaattttaagaacakgaaaacagggtctcaakgagaccctgttttcatgcycccttgtacacggaatttaactatttcctgtattaatgaaagaggtaactcttgcgtgtagggaaattgaatggcaccttttgaggttttaaaagggcgtaattctttgctgaaacgttggatggctgatggcgtaggatagaaacctaaatgttgcttagccgccgcaaaatgcactaaattgccatttaagtaaaaggtcggcattccataagcgattttttcagtagtctcctgaggaacaactgctaaaattgcttggtagatttctgttaactgtgtttgatgttggggttgctggcgaatatagtttgcaatgatggtcatataaaaacacctccgtttgtttcagtatactatgtaaaaaataaaaggcgaaggagatacaaaaaaaccgtctagtatkttttctttactaaacggcttttagcttaaataactacctaaagggtcttgcatggaaatgtttgtcackccttagtttaattgttttaagtgtgcaattgcttcttcaattgtgtgaccagttgctgttttactttcatttttkgcatcaaaaacaatgaaaatatttttgtctgtgtctaattgaatacggtattgaatgttttttactttgtaagtcatagttattctcctttcataaagtactctaaaaaggcgacgataactgataacgaaattccattgttactataccactggaaaattatttttgcaacaaataacattttttctttaccattccttagacttctttgctagctacttctttacattctttttcaagaagcataaaataaatacattactagtttttgaataggagatcgatgtgaaaa

SEQ ID NO: 460 - DNA, 2818 bp; double-stranded, linear
cacttcttcctgttgaatgagtcgcttaagcgccaatgtaggtcacgccmctactataagcattacattaggtaagacacgatacgaaatcgtttgatcattgatgacattgctttcagaaataatgattccatcagaagtgaccgcttcaacaaaagcaacatgtccatattgattatctgcgccagcaactcctggttggaaactaatcgcacgaccagctttaggcaatgaactaacttgatagcctaatgcacgtccttttcttccccagtcactgccatttcccataaattcatccacagaagtgcccaactgtttgaaacgattatagacataccacgtacattggcccacgggatagctaccacttcgattataattgatcccatcatagactggaaaatgcatttgttgctgttccgcttccgacagyttatttttagattggataatcaaaccgtccactgtttttggtaaatcaaattgggttaagttataaaccgcaattaacgaatttaatttattatcgtattgcttgtctgttgcatatttacctgttaaaaaacgcgttgcttgaaggtagtttttggcttccgaacgccacgctggtttataaaaatcttgatttccgtcaatcccttgtcggagtaattgaacataatcttgcagtgagtcattatagccaccgtaatcgcgaaacccagcggaaattgtataaagttggcccctctggatcagcctcttttgttgaaaagctaacactattcctggaacgaacctttcacgccaaagagatataataaggttctttggctagttgactttcgccagagccactttctaaaatagcctgagctatcattactgatgcaaaaacatcgtatttttcgccaagttctctggctgtctcaccaatttttttaataaacgctgtggtttgttctgacttctgcatttcaaatgacgcaccatatgttgctaaaacttctttgccatactccgttaatatgaactccttaaaaggattagtcactaccaagcgtttttcctcttttgagtctggttgttgtttggcagtatagatattctctaactgagcgattacttctggtttctctttagaatccgattccgctgcggcaattaaatattttccttggccargataaacaccattttgaagcgtttttccttcagctgtttgccaaaaaatcagatcaccaggttctgcctcctctatagaacgaactttaccaaatgtcatttgttcttgcggcgtactgccaatgtctattttaaataattgttggtaaattttttgggcaaggaaactactggtcaatgcttgctccgtcaaattaaattctttttttgttttcccaacgtgtcttaatgcttcagcgaccacgactgcccgtttcttttcgccaaaagacgacaacagtggaagttcgtagccttttaaatttgaagaagctatttcatctactttgagggacggatttaacgatacagcctgattttcttcaacaaagttattgttggcttcaggaacttggaataggttcttcgggttcttgcttggtcacaggaacttgtggtggttgcgattgttcaacaggctgcgtgatttctgatgataccgttggctctgtaggttctttttttgtttcagaactagtawttgtggttgtcgtttctgtcgttgactgactcgttgattcggtagtcgtatcggtagaactacttgattcagatgacgaactactagtggacgttgtcgatgtagcaacagttgtttcggttgtttcggttactttttcttccgaagtaattgtcgtttccgaggacagagctgtttgtagcgagctacttggtaattctgcagccaacgtaacaactggagcgacttccaaactcagaagaacgagaatacttgttaaaacaagtagttgattcttgattttctttcttttcattcgtaaaaatcctctcctattacttacttgcgcatttgcacactgtttttgtacaaatgcgccttgtaagttaatgatacgctaattttgctcttttttatttttgaagaataattttcctaaaccaatacttactatcaatagaaaaccactgattgaccagattggcgaaacaacttcatttgcttttggcaaagtaccagaagtggtggttttcgttgtcgttccacctgttgctgtgccctttccttggctggttacaccaccagtaccgctaaccgtgctatgatttccattgttgcctgtagagttgctactgattggctcttctgccattgcttcaatggcttgtgataaaatacttaaacatttgtccacagcttcttgcgtcgcatttgggtcctcaacaagtgcttttgcttgtttaattgcttcagctaaagcttcttgcgatgcttttgtaaattgttttcctgctttaggtttcaaggtttctgctttttgaagcagttctttcaactttgttttatccgtttgaaggacttgttcctctaaactatccaaagcagtttttacatttttttcagcaatatcaatttgttcttgccgagcatttttatcagctaaaatcccttccgcttggtcaattgcttcagttaagcgcgctttagactcgctggtaaattcttttccggcagatggtttgattgcttttgctttggctatcattgcctctaaggcttttttatctgtaactaacacttcttcttgtaacccatcgatggcactagttaattcagcaaccgcttcatcaatcatttttgattagctgctgg

SEQ ID NO: 461 - DNA, 1326 bp; double-stranded, linear
atattcttatggtcacttctgccacagcggaatattgtaatagttagagcgcattgcactcaccaaattagtttaccacagacaaaataagctgtaaagagaattttcttgaaagttcccttatttttgctcttcttgtttaatttcctctaataacttcaacatttcaggcgtcatttctactgattccaacatgtcaggtcgacgtaaaaaggtccgtcgtaatgattcttttagttgccattctgcaattaatttatggttaccantcgttagcacggcagggacttccatatcgttgaaaatagcaggtctggtatattgtggatgctctaataggccagtggaakgkgaatccgtttgtgcagaaagatkgttacctaagrcatcaggtaataaacggactgtcgcatcaatcatgaccattgcgcctaattcgccccctgttaaaacgtaatcccccaatgaaacttcatctgtgaccatcgtgcgaattcgctcatcatagccttcataatgtccacaaataaaaactaaatgttcttcttgtgaaaattcctcggccattttctgattaaacggttttcctgctggatctaataagatgacccgttttggttgctggtttgtctcttcttcaattgcctttaggttatcatagatcggttgtacttttaaaagcatccccgcgccaccgccatacggataatcatcgaccgtttggtgtttgttatctgaaaaatcgcgaaaattagagacattcaattctaataactgcttttcccgagctttcccaataattgattcccccattggtccttcaaacattctaggaaaaagagttaatacatcaattctcatcgtcaatcaatccttctggaatgtccacatcaatccgttgattttcgacgtcgacttttgtaacaacgccttcaatatacggkaaaagtaaatcttttttcyttggycgttggacgacccacacatcattcgcaccaggagataaaatttctttaatttttcccagttcactgccggtttcatcgtaaacagtagcaccaatgatttggtgataataaaattcgtcctctgccaattcagcgagattgtcttttgcaacttttaaaataccgtcacgatatttttcaacatcattgatatttggatgtccttcaaagcttaaaatgtcaaaattcttatgcttgcggtgggacttcacgaccaattcaattggtgcttttttctcttgaaatagtagtaacatagcccctttttgataacgttcttctggaaaatccgttttcgaaatgactcgaacttctcctg

SEQ ID NO: 462 - DNA, 2845 bp; double-stranded, linear
cagagaaattatttttctaattactggaaaaatagtttttctttttttgtgtaatcaaagaatcaaccaattaattcattgacacaaattttaaatggaacgatttcttgtacatctaaagtagttttagaaagcattgtaaaaagcagttaaaagcaaacttatgagctcactcttacctgcttcaatttatttctatagattagtagttgctcttacaattcttcatcaatgagtttagtcttgttattctccatcaccttaaaaaatggatagtaaatagcagcactaattaggattaatacaaagcaaaaaacaatatttcgccagtccatacttgagagatatgcttgtgcaaaaaatggtgtgaaagatgggtcgatgataaatccaacgctaatcagtccaacactctgcgcaatatacgtcaacaacaatgaaacaattggtgtaagcaaaaatggaatagctaaaatgggattgaaaacaatcggaagcccaaatatgaccggttcattgattgagcatatcccgggaataagggaaagctttccgattgttcgatattctgaaactttgctacgtatcattaagagtactaaaccaagagttccacccgcaccacctaaaaccgatatacggaacatttgtagattcatcagatgagtcattgcttctttatttgccatctgttctgcattcaaacctgtttgtgccattcctaaagtgaagacgattgggaaaatgatagatgaaccattgataccgaataaccatagaatgtttcccaaagtgacaatcaataagaatccaccaaggctaccagcaatatttgtagcaggcgttaaaacctgcatcactgtttctgggaaaatctttttcgttgtcgctaagaaaatcagattgatgccataaaaaagaatgatgtttgtcaacagtggaactaaagtattgatgaaagtagctaccataggagggacagtatctggtaattttaacttgatgtttttcacttcaaacactcgattgacttcaacaactaataacccgatgatgatagctacgaaaaggccattagttcccaaataatttaagtttattgttccttttgtcaccggggtacataccatcaggtaaatgacagaagcgaccataccattcatagatgggttggttttgtattcatttgcaagagagaacgcaataccgaagacactgattaatccgatgatccccattgtcaagttgtatggcgcagtaatcaagtcataattagcgactgcaaaatccttccatccagccataattttcataaagaaattagcggtctctggattataatgatcaatatttattggtggatttgcaaaaatcagaaaaaaagaaccaataacaataaacggtaatccaaacatcattccactagaaatggctttaagatgtcgctgatttccgattttttcagcaatcgggctaagtatctcattcaattttgtgataatcttagaatttcccataagtattcccccttatacttgccaaggattaaaaacaaacgtacttggtacgacatgattcggatcatatttcttaataatttcttcatattgttctttgtaatcattctctacttttgcttgcgggataactttacttgcttcatgtaagaaatgctctgatcctcgtcccatctcctgacctcgtgtcgtgtgtttatcaagagcgatatctggaatttcagggacatatcccatagcaaagcttttaattacaatattttttaaaagatctgaggaacgatctttctctgatccgcataagtagcgaatggcatgaaagaaaaacatcgcacgatctgattcattatattgaaattccttacgcatcatattcaagttattgatcatcaatgctgctataggatttcccataccgatatcctcaacactgattgccaacaaacgtctccaaagcttttcttcaaactgtggtgaagtaatatacatctcgtaagcaaattcgcaagcgtctttttcttttcctctacggatagatttttgtaatgcagaaatgacttcgtcaccagctaaaccgtttcgcgtagtcatctttgcccaaggatcttgaataaattttttttctgtcatgttataatactcctaactaaagaatttgaggtggaccttatggatactgaaatgctaatcgataaatatcagttgaatgattcagaagctgctgttttacggtttatggataaaaaccgtgactgcttgaaaagtcttggaattcgagaagtagcaaaggcttcttatgtctcaactactgcaatcatcaatatggcaaaaaaaatcggttattctggttatagtgagctggtctttgcctatggaaacaaacattcatcaattagctttcctgagaatttctcaaacgaagaaaaagatgaatttatccgattattatctcgctatcgagaaaaacggattatggttctaggctcgggtttttcacaaaatattgcaaaccatttttctgaaatgcttaacctttatggatttcgtgcaactgccaacagtcatttagaattcctacgagaaaatgttgaaaaagatgtcctgatttttattgtttccaactctggtgatactcttcggttagcagaacttgttaaattagcaaaaaatcatcatattgatctcatkgctttcgttggtgaaaagaaatccaaaattggacaacttgctacactaactataagcacggaaacmtwtaatccycaggkagtttcagaatatcaaccaaacctgttctttgggactgcnttgaatcaattcgnactatt

SEQ ID NO: 463 - DNA, 2373 bp; double-stranded, linear
acgaccacaccaattaatgaaatggcaatcactgtagctacacctgcacttgttccaaatccatattagtatttggcaatacttttggtttttcttgtggagttgtaacattcactttgttagaatctgtcggttcatcattaatcaccaattgtgccacgtttggaatcataatattccctttatcatcgacatattgcgaaaagtctgcgtctttcaatttccctttaatgtacacaaacaattgtttttcttttaatttgtttggttcattagcattccaagaaactttttgtgttttttcatcaacactaatttttccttgatccgtaatgtctgtcccatctgaaagagtgacttttacttctttattcgcttccaatacatcttctaaatcatcttgaatgactaaagacgtcatatctttggtatttggtacttgcacatctaatttgaacgtcacttcatcgcccactttggcactggtcaaatccacttctttatcgccttcgaggattttcttagcgatagacgggtcttttggtgtgacagtggttgttgtttcatcagttgggacttctttgttgttttggataatttttgctttatttggaatttgtaacttgccatcaataaggtacttatctaagctggcaccttcacgaatttttgtttggaaattgaatttgtattcgtgattatagaaatccgctgtttttaatacgtcagcctttgcaaccatacgtactaaattgccttcatgcttcgcttcaaatttattggtaacgtcctttcctgcttcgtccgtgactttcacatcagacacacgttccaattcaggaatcagttcgtcttgcatttcatagttgctataataaaattctttcatttcatcaggaactttatgtgtgatcgtatagctatatacttcgcctaatccttctaacgtatttttatcaacatttgtttcatcactatctgtcaccgttttagtaggaatcatcggcgctgtccgaactggttttttggcactatagccaaaataactatactggttattattttttgacggtaatggattccctgaatttttttcgcgtgtagcgaaatcttcactatacgtgaaatcgaatcgagaacgattagaatacaagaacgtaaaatcaccacgattatcaccatcatctaaaggaatatcatcagaatcgtaaaaagtttttccaccatctttttcttctttgtatttaatgattgtatctttcgttggaacgtacaatttatcgattgctttatacgaatctttgtcaatcgtcattccttgtaaattatcaatatcaatccatgaatagtagcctgaaactggcttttctttgtctgtgccatgttctaggtacgtccatgtttgtttcacccatgagaaaccaccttggtaggttgcaattgcggatacattgttaaaagcaacaatattatttgacaccatattttgtgcatttttatattgttcccaatcttgaatggtaatttttaaatcaattggtgtcccatcatcagctgtacctacattgttgtaacgaatccacgattgccctttcttcgttttcgttacatcaagaccgattttcccgtcccatttttgtggaggcatattaacgtaaacatcattcgtccacccatcaccacctgtttcaaccgtagtgacacctttaataaattttgcaataaagctatactttgaaccagcttcatcatctggtggtcactacagaagcattcggcgcattaatgattgaattagcgcttgcacgttggaaaaaatctgctttcactgtttgtggtacttgtccgctttcttgtgcttgaaccatcattggcatttccatgcctgctaaaattgttacagttgctaatccttgaataatcgttgttttcttcaaaatatttcctcttttcattattaattttttgtagttctatttcatttctcctagattttgcataaaaaataggagagccacgaatcttcttcattggttcacctttccacagttattcacttaaaaagttatttgtataaactatatagcgtaatacaggagcttcttgattctttttattctggaattcttctttaaaatttacattttcatatacatactcctcaacaactatacaacttttctttgctatactagcattaaaaatcaactcattttctaaagaaatttctgaaagaacaaaaccttctttcattgaatctgcatgcttcaaactatctccctttaaatagagtttcttttcataaaaaagtaatctatcccttactctatcaacaactacagganacaattcttctaactctcgancatctct

SEQ ID NO: 464 - DNA, 11036 bp; double-stranded, linear
cgatgatgaccttaagcgaccgaaatgaagcgattgatgtggtaacaatcaaagatcgcctagaacaagagaatttgttagaagatgttggtggactaagttatctgtcagatttagctttagctgtgccgacagctgccaatgtcatttattatgcaaaaattgttgaacaaaaatcgttgctgcgcaacttaatccaaaccgctacagagattgtaactaaaggctttgagcaaggtgaagatgttgaatctattttggatgatgcagaacgaagcattttagaagtctccgaaaagcggaatcgtagtggctttttatcaatttcagatgttctaaatacaactattgcgaatattgaccaattataccaaaatgatgaagagattactggtttacctacaggctatcaagcattggataaaatgactgctggcttgcaagcggaagagctaattattctagcggcccgtccagcggtagggaaaaccgcttttgcattaaatattgcccaaaatgtcggcaccaagacagataaagctgtcgctatttttagtttagaaatgggggcagaatcattagtgaaccggatgctttgtgcagaaggatccattgaggccagccatttaagaacagggcaattatctgaagaagaatggcaaaacttaattattgcgatgggtagtttgtcccgtgcgaatatctatattgatgacacaccagggattaaaattaccgaaattcgtgcgaaatgtcgtaaattagcacaagaaaaaggcaacttaggtctaattttgatcgactacctacaattgattgaaggaactggaaaagagaaccgccaacaggaggtttctgatatttcacgtcaattaaaaaaattagcgaaagaattaaaagtcccggttatcgctttgtcacagctttctcgtggcgtggaacaacgtcaagataaacgtcctgtgttaagtgatattcgtgaatcaggttccattgagcaagatgccgatatcgttgcctttctttatcgtgatgattactacgatcgtggtgaaggagaagacggtgatcatgagccaccagaagttgacaatgttgtagaagtcatcattgagaaaaaccgtagtggtgcgcgtggaacggtcgaattacttttcattaaagaatataataaattttcttcgctttcgccgaggacagaattttaaaaaacgaactcattttttgagttcgtttttttgcttattaagggattaaaatcagagagtaaaacacgaacaatattcgtatattttattattttacaaaaacataactaaaaatgttcgtatttttgacagaaacgcttttgattgtgaaagaatattcgatttttacccttgaaagggactggttttactggtacaatgattcaggacaaaaaaattatgaacgaggtgttcgaatgtcatcagtagtagttgttggaacgcaatggggcgatgaaggtaaaggaaaaattacagactttctaagtgaaaacgcagaagtgatcgctcgttaccaaggcggagataacgccggacataccattaaattcgacggcgtaacgtataaattacatttaattccttcagggattttctataaagaaaaaattagtgtaattggtaacggcgtagttgtgaatccaaaatctttagtaaaagaattagcttatttaaaagaaaataatgttgccactgataatttacgtatttcagatcgtgcccatgtcatcttgccgtatcatattaaattggatcaattgcaagaagatgcgaaaggtgaaaacaagattgggacaacgattaaaggaattggcccagcctacatggataaagcagcacgggtgggaatccgtatcgctgatttattggataaagaaatttttgcggaacgtttgcaaattaacttagaagaaaaaaatcgtcaattcgttaaaatgtttgatagcgaaccattgaatttgatgatatttttgaagaatactatgaatacggacaacaaattaaacaatatgttacagatacttcggttattttaaacgatgcattagatgctggaaaacgggttttatttgaaggggcacaaggtgtcatgttggatatcgatcaaggaacctatccatttgttacttcctctaatccagtagctggtggcgtaactatcggtagtggcgttggtccatcaaaaattaataaagtggttggtgtctgcaaagcgtacacttcacgtgtcggtgacggcccattcccaacagaattatttgatgaaacaggagaaaccattcgtcgtgtcggtaaagaatacggaacaacaacaggacgtccgcgtcgtgtcggttggtttgattcagtagtcatgcgtcattcaaaacgtgtatcagggattacaaacttgtcattaaactcgattgacgtgttaagtggtttagaaacggtgaaaatttgtacagcttatgaacttgatggtgaattaatttatcattatccagcaagcttgaaagaattaagccgctgtaaaccagtttatgaagaattaccaggttggtctgaagatatcactggttgcaaaactttagccgatttaccagctaatgctcgtaactatgtgcatcggatttcagaattagttggtgtgcgcatttcaacattctctgtaggtccagaccgtaaccaaacgaacgttttagaaagcgtttgggcacaaatttaagcagatttttaagggaacgtaaaggatggcttatgccagttcagcctttacgttcttttttaattttatataaaaatgaaaaactatggtaaaataaaagaaaacatgaagggggcaattgtccgtgaattatcaattagtgacagattcttgttgtgacttgccgtatacatacttaaaagaaaaccaagtaccttttattagcatgaatattcaaattgacgggaaagaatatcgcgatgatttaggtgaaacgtttgattatcagaacttcttaacggctattaaaaatggaagtatgcccactacctctcaagttaatgtaggacgctacaatgaatttttccgtccttttgtggagcaagggttaccggtgatttatttagctttttcatctgggttaagtggctcttatcaaagtgcgttgcaatcagtagagatgttaaaagaagagtatgataatgtagaaattcatattattgacacaaaagcagctagcttaggtcaagggatgttagtccgagaagccattcgattacaaacagatggtcattcattaggagaagttgttgcctatcttgaagagcaaaaaatgaaacttcactcgtgggtaacggtagatgatttaaaacatttagaacgtggcggacggatttctaaaacagcggctgcacttggtggcttaatgaacattaaaccaattattcgcgtggatgcggcaggcaaactagcatccgttggtaaaactcgtggacgaaacaagtccttgcaaaagattgcgcaagaaacgattcaaggcattgtagagccaatgaaacaaacactattgattgcatatgcgggaacgaaagatgacgcggaaaaagtcaaagaattaattgaaaaagaaatagaggttaatgagatactgatttatcctctaggacccaccattactagtcataccggaataggttgtattgctgtgttttcttttggtgaaaaaagaaaataaaaaatagagaagtcattttttaatgacttctctatttttttaataatctgaactgaataaaacgtccatttgtttttgaatttctgggttttccaagaattcatcataggttgtttctgcccgatcaatgacccctttatcagaaacagcaataattcggttcgctaatgtttggataaattggtggtcatgtgaagcaaaaagaattgaaccagtgaaagccatcaacccatcatttaatgcagtgattgattctaagtctaagtggttcgttggatcatctaaaactaagacattggctttggaaagcattaattttgaaagcatgacacgcactttttcgcctccggaaagaacattgactggttttagtacctcttcaccagagaataacatccgacctaagaaactacgtaagaacgtattgtcatcttcttctttaccagcaaattgacgtaaccaatctaaaatggttaatggctcttcaaagtctttgctgttgtcttttggtaaataagcttggctagttgtaacgccccaacgaacagaacctgtatcgggagtaatttcgcccataatcactttgaataacgtagtcgttgtaatatctgagtcagcgatgaatgccactttatcatcttttgttaagttgaacgagatattatctaagatttttttgccatcaatcgttacagagacattttcaacttgtaataagtcattgccgatttcacgttctggtgtaaaaccaacgaatggataacgacgagaggaaggttgaatgtcatctaaggtaattttatctaacatttttttacgagacgttgcttgttttgattttgaggcattggcgctaaaacgagcgataaagtcttgtaattctttgatttgttcttcttttttggcattagattgtgcttgcaattttgtcgctagttggcttgattccaaccagaaatcatagttaccaacgtaaagtttgattttactaaagtctaaatctgccatgtgagtgcagactttgtttaggaaatgacggtcatgggaaaccacgataacggtattttcaaagttgattaaaaattcttctaaccaattgattgagcgggtgtctaaaccatttgtcggctcgtctaatagtaagacatctggtttaccaaaaagagattgagctaataatactttgactttttgaccagctgttaattcgctcattttttgatcatgtaattcttctggaatgtttagcccttggagtaaaacagctgcttcaggttctgcttcccaaccgtcaagttcagcaaattcgccttctagttctgcggcacgaatcccatcttcatctgaaaaatcttctttcatatagatagcatctttttctttcattacttcgtaaagacgtttatgtcccataattacagtttctaaaacagtgtagtcttcgtagtcaaagtgattttgtttcagcgttgctagtcgctcattaggacccattgaaaccacgccagttgtcggttgaatctcacctgataaaattttaagaaacgttgattttcctgcaccgtttgcgccgattaagccgtaacagttgccaggagtaaatttaatattcacttcttcaaaaagtttacgatctggaaattgtaaacttacatcattaacagtaatcaattgttttcctcgcttttaatatattcttgaacctctctgcattatatcggctacagaaccttttttcaaggagtttcaatctttttacagaaacgaataaaaaggtgggttttttatagaaaaaaggcgcttttttaaaatgtttcatgtgaaacagaaatttttttcatgaaagggtttttagtgtatttttttaatgatacactgtatcatgtaaattaattagtgtatcgattaaaggagccatcaaaaatgaagcggattgaaaaaatctatcaatatgttaaagagcaaacgaagaatttaacgccaatgaccttaacaagtgatgcgggagtcacgacacaagaaatttcagaacgtttaaacattcagcggaccaatgctagtaaagatttgaatcaactggttcgtgaagggcgcttgaaaaaattatctggtcgaccagtaaaatatgtcgcgcaggtggcgtttcagcatcgaccattaaccaagccagttaaaagttatcgggaaaaatcaatggatcactccacaaaaacttttatcgaaccattggttgaaccagtagtcacgacaagtaaaaccccagaagttgaagatattttcaaaaaaattatcggttcagctggaagcatgaaaacgccggtggaacaagccaaagcagcgattttatatccgccaaaaggcttgaattgtttaattactggaccaacaggttctgggaaaacttattttgctcatgccatgtttcaatttgcgaagctgaaccaaattgtggccaaagaaaaagagtttgtggtgtttaactgtgcagactatgcgcataatccagaacttttgatgtcgcatttatttgggtatgtagaaggggccttcacaggcgctacgaaagcgaaagaagggattattgatgaagcagatggcagcattctgtttttagatgaagtacatcggttaccacccgaaggacaagaaatgattttttattttatggatcacggcgtgtacgcgcgtttaggtgaaacagtgaaatcacatcatgcggatgttcggattatttgtgctacgacggagaatcctacttcttctttattgaatacttttgtgcgacgcattccgattatcattcaattaccgaactttagtgaccgtcctgcgaaagaaaaaattgacctcctaaaagtgatggtttcaatggaagcagcgcggattcaacggcgaatctctttgtcagaagatgtggtcaaagcgttaattggaagtgtttcttatggaaatgtcggtcagctaaaatcgaatgtgcaacttgtgactgcgcgagggttccttaatcagatggaacaagaggaattaatgattacgatggacgaattaacggacaatatcaaagaaggcattatgcaacttgccagtaatcgagaagtattgtcggagttatcgaaatatctggaaccgcaattagtggtatcaccaaatgaatctttagtagctattcagtcagatgcctatgaattgccttacaatctatatgagattattggagataaagcggctctcttaaaagcagacggcttggaccaagaactaattaataattttattacaacggatatcaatgttcatttaaaatctttctacaaagattatgggttcacctttgatacagaaaataaattggctgaaattgttgaccaacgaattattgatgtcactaagaaaatttataattttgcagcgaagcggttatcgtattcgtttcaacccaactttatttatgcaatgagtttacacattagttctttcttgaaacgcatccaattaggcaaagatcctaagcatcctttaaatgaaagtattcgaaatatggttttagattatccaacagagtttgaaacagcaaaagaaattaaaaatattattgaaagtagttatcagatggagattcctgaatctgaaagttactatttagctgttttgctcatttctttaagagaaaatcctgaggctggccggattggcattgtcgtggctgcgcacggaaatagtaccgctagcagtatggtacaagtggtttctcaattgttaaatgttgataatttgaaggctgtggatatgccgttagatatgccaccgaaagaagctttgcgtaaaatcgttgaagcagttggtgaagtgaatgaagagaatggcgtactattattggtggatatgggttcattaagtactttttcagaagaaattgtacgccagacaggcattgatgtgcggacagtagacatggtgaccacgccaattgttcttgaagcggcccgcaaaaccgcattaattgatacgcaattggaaacacttcacgagtctttaaaaaactttcatggctatgccgatattcgccaaagtgaaacgaaacaaatcattgaaaattggaaaacaagagcaattattgctatctgcgcttctggagaaggaactgcgcgccgaatgaaagagcttattgaggaagctgtcttgccacaaatagactggcatttagaagtgattcctttgtccattgtaaatatgaaagaagtcttgcctaaaattcaagaagactatgaaattattgcgacaactgggattaccaatcccaaaattggtgttccttatatttccatggaaaatttcttttccggtgaagcagaaaaaattattcagcaattactagcagagcggaaagaagaagtaatgaataagccgttggacgaagcggcagcaaaagaaatttgtctaaaatatatggagcaaagtttcactttcattaatggaaaaaaaatcattgatctgttgtggtcattcgctaaaaatatccaaacccaattagcgatgccagaagagtacacattttacatcaatttgattatgcacacatcgggcatgttggagcgtattttacggaatgatacactgacggtttcagaaaaggaacttggtcgattggttcaagaaccaatttatccagtgattgtgtcctcaattgagactatggaagaagctcttaatatggatgttccagcagaagaagtttattttatcgcacagttagtcaaaaatgctcagtgtatcgaagataaaatcaccgaaattgatacactagattaatacagaaaaacgatacactatttattagtgtatcgttttttttattttcttaaaaaaacctataattttctaggtttcgaaccgatacactaaagttggcacgaaacttgcttataataaggtgtccctttttacctaaaatttttaagtaaaaagacaaaggtcctaacctttaaaaatgaatttaaaggagcattcccgatggtaatggatattcgtttagctcgaattgatgatcgattaattcatggccaagtagcaactgtttgggcaaaattgacgaacattaatcgcattttagtggttagtgattccgttgctcatgacaatttgagaaaagccttgttggttcaagctgctccacctggtgtcaaagtaaatgtcatcactgttcaaaaaatgattgatgtttaccctgatcctcgttttgattcgtttcgagccatgttgttattcactaatcctttggacgtgaaacgagtggtcgaaggcggtgtacaactaacttctgtgaatattggcggaatgagtttcagcacaggcaagcgaatgattacgaatgcagtcgcagtggatgccaacgatttaaaagcatttctgtttttaaatgaacaaggtattgaattggaaattcgaaaagtcgcagcagacagccaagtgaatttgatggatttactgaaaaaagagcgtagcaaagaaaataacgccagctgacgttaatttttacagacgaaagacattgaaaggatgtggtggcctaggaccaacatcattgcttcatgaactgtattgataaaggcaagtgctgatgttgaaaaaaatcaagaactattgaaattttttcatttatttttgtcagaatctgatttatctgatttttttcaaaaagtgaaagcgtttagcagtacaaccatgaaaaaaaacatcaattatacaggaggtataaaaatggtaggaattatcctagcaagtcacggtgaatttgctgaagggatcttgcaatctggtgcaatgatctttggcgaacaagaaaatgtaaaagcagttacgttaatgcctagcgaaggtcccgatgatgtaaaagcaaaaatgcaagaagccattgcatcgtttgacaatcaagacgaagtactatttttagttgacctatggggaggaacaccatttaaccaagcgaactcattgttagaagatcataaagacaaatgggcaatcgttgcaggtatgaacttaccaatggttattgaagcatatgcttctcgtttctctatggaatcagcacaagaaattgcgacacacattcttgaaacagcaaaagatggtgtcaaagttaaaccagaagagttacaaccagcagaagcaccaaaagctgctgcgacagaagatgcacagccaaaaggttcgttaccaccaggtacagttgttggcgatggcaaaattaaatttgtgctagcacgtattgattcacgtttattacatggtcaagtagcaacagcttggacaaaagcaacacaaccaaacagaattattgttgtttctgatgccgttgcaaaagatgacttacgtaagaaattaatcgaacaagcagctcctccaggagtaaaagccaatgttattccaatcagtaaaatgattgaagtagcgaaagatccacgttttggcaatacaaaagcattattattatttgaaaatcctgaagacgtcttaaaagtggttgaaggcggcgtagaaatcccagaagtaaacgttggttcaatggctcactctgttggaaaagtcgttgtaagcaaagtattatcaatgggtcaagaagacgttgatacgtttgatgaattaaaagccaaaggcatcaaatttgatgtgcgtaaagtgccaaatgattcaaaagcgaatatggacgaaattttgaaaaaagcaaaaaatgagttagcaaacgcgtaactcgtcaaatacaaatcaaaataggaggcttatcatgtctgttatatcaattattttagttttactcgttgcctttctagctggtatggaagggattttggatgagttccaattccaccaaccgttagtagcatgtacattaatcggattagttactggtaatttagaagccggaattgttttaggtggtactttacaaatgatcgcgttaggttgggcgaacatcggggctgccgttgcaccggatgccgctttagcatctgttgcctcagcaattattttagttttaggtggccaaggtgttaaaggtgttccttcagcgattgccatcgcagttcctttagcggttgcaggtttgttcttaacaatgatcgttcggacagttgcggttccaatcgttcacatgatggatgcggctgctgaaaaaggcaacattaaacaagttgaatgtacacattttcgctgtatgtttacaaggtattcgtattgcgattccagcaggtgcgttactattcattcctgctgacactgttcgtaatttcttagaatcaatgcc

SEQ ID NO: 465 - DNA, 1440 bp; double-stranded, linear
aacggtgatgcaggaaaaagaatcctcttcggcaatcgccgaaagcagtagcggaaatgcggttgcagtaactactgaaaccacaaatgagatacaaaatagtgatacagatggaaaagctgtttctgcrgagagtgttttttcagaagcagattataaacaagcaactgcactggagttagcaactttagtaagagaaaaaaaggtgacgagcgaagaattagtaaaaattgcgttggccatcactaaacgtgaaaatcctacattaaatgcggtcattactttacgagaagaagcggctttgacagaagcaaaagctttacaagatacaggtcaaccatttctaggtgtgccgctcttactaaaagggttaggacaatccttgaaaggtgaaagcaacacgaacggttttggttttctccaagatcaagtagctggtgggacatcgacctttgtcaaagcactacaaaatgccggattcataatcattggtcaaacgaattatccagaattaggttggaagaatatttcagattcaaagttatatggcgtttccgtcaatccatggaatcctaaccattattcaggtggttcttcaggcggacngggtgctagtgtcgccgcggcatttgttcccattgcttctggaagtgatgctggtggctctatccgcatccctgcttcttggacaggcaccgtagcttgaaaccttctagaggagtaatcattggtaattctaatagtgcaaaaggtcaaactgttcactttggtttaagtcgaaccgtggcggatacaaatgcattatttgaaaccttattaaccaaaaaagatcttcctgcgggacatttaagtcaagcgcaacccattgcttatacaacagaatcccctgccggaacgcctataagtgccgaagcaaaagaggcggtcgctgaagctgttgcttttttaaaagaccaagggtacacattggttgaagtgaagcaccctgttgatggggaacgtctaatgaaaaattattatactgtagctgctggctcagcaggaattgccgattttatggcgcggcagaaattgaaaagaccgcttgaacgaaatgatgtagaactgttaacatgggcgctttttcaaacaggaaaaaatataacgagtgaagagacaactgcggcttggacagatattgctttacaagcacaagcgatggacgaattttatcmacagtatctatcytattamcaccaacgacggctgcacggcacctagtaattgataatccgttactaaaaccagaacatgccagcacagattggaaaaaaattgatcmattgtcacccagccagaacaaaaacmattggtttatgaccatggctgacggcgttcacattacmccgtttaccccaccaagccaaattttanttggggccatcccgccattaagggggt

SEQ ID NO: 466 - DNA, 821 bp; double-stranded, linear
tgcactgaatcatcctaacctagaagttcgcttaataacgacggttgcagggaatgtagatgtagaaaaaacaacaaataatgccttgaaacttgtcgatttttttgggaaaaaggttcctgtagccaaggggtgtaattgtccgttacttattcaattagaagattctgctgagattcatggggagactggtatggatggctttgagtttccgcaacctatctctacgtgtttagatattcatgcagtggaagctatgcgaaaagaaattctgtctagtgatgttcctttgaccattgttccaattgctgcattaacgaatattgctttgttactgaccctctatccagaagtcaaagaaaatattgcagaaatcgtcatgatgggtggctcattagcaaggggaaatacaaatacaagtgccgaatttaatacgtatgtcgatccacacgctgcacaaattgttttccaatcaggtgtcccgctaacaatggtaggattagatgttacaagtcaagctgtgttaacgaatcatgaagtaacagccatcagagcgcttggtagagttggggaaatgttttatggtcttttccgtcattatagaggcggcagtctaactacaggtttgaaaatgcatgatgtctgtgcgattgcctatttaacttcaccagaattatttgagacaactgaaacgttcattgaagttgctttggaaggtccagctgcgggagctactgttgcggatttaaaaatgaagtatcataaaaacacgaatgccgttgcctgtatagatgtaaatgttgaagcttttcaaaaatggg

SEQ ID NO: 467 - DNA, 1420 bp; double-stranded, linear
cttagggatggtgactactagtgacggtcgaagcttcgctgcagcagatttgccaggcttaattgaaggagcttctcaaggtgtcggcttaggaacacagttcttacgccacattgaacggacgcgtgttattttacatgtcattgatatgagtggcatggaargacgcgatccttatgaagattatttggcaatcaataaagaattggcttcacacaatttacgtttgatggagcgacctcaaattattgttgccaataaaatggacatgcctgaagcagaagagaatttagcgaaatttaaagagcaacttgcgaaggaacgcaccgatgagtatgctgatgagctacctattttcccaatctctggggttactcgcaaaggtattgaacctttattaaatgcaacagctgacttgttggaagtaacgcctgaattcccattatatgaagatgaagtggtagaggaagaaaccgttcgttatggcttccaaccagaaggtccagaatttacgattgatcgtgaaccagatgcttcatgggttttatctggtgaaaaattagaaaaattatttgaaatgacgaatttcgatcatgatgaaacagtaatgcgttttgcacgtcaattacgtggtatgggtgtcgatgaggcattacgagcacgtggcgcgaaagatggcgacattgttcggattggtaattttgaatttgaatttgtcgaataagcataaaaccagttcactcagtgaactggttttttattttaaaattagtattaaattagcgaatagattgaaataatatttttaatagcttataattttaaatgtwacaaaataacaaacgaaaggagcgaaattgaaatggaaaacaatcaagcaatggttcctaagttttcagttaaaagtgccggttttctttttagtatggggctcttatgtggtgtcctgttgccgagtgttttattatggactttcagctgccgtttaatattggtgccatgatttttttgcctgttgggattgcttttgcgttagcgtatagtcattatttattgaaacgaaaacaggtttttgtaagcgttttatntggttgtttttaatttctcttattttatagagcttatctcttatttatggctgattaaaggagttattttttaagagaaaaacagaggagagtgttatttatgttagataaactgactgtttggattgaaaatcatctagctggaccaatggctaaaattgccaatcagcgccatttacgtgcggtgcgggatgggattattgcgacattacctttaattattgtcggttctttttttctaattattgcgtttccgccgttaccagaatcttggggcattactcaatttttaacaagtaatgctgctacaatcttattgccttaccaatgac

SEQ ID NO: 468 - DNA, 2179 bp; double-stranded, linear
ggtatatccatgtatwacagtatagccmttacataatcatgtaactatcaacaatcatcaaaggtttccwaatctttatggattgctggtatcctatcgatggtgtgtcaccatatcccattgtatgcttatttcccaagcatggatggtattggcatttggcaattcacatccgcttatattgcaggtggtttagatggtaacgtagatttaacaggaattacggatagtggttatacagatacaaataaaccagaaacggatacgccagcaacagatgcaggcgaagaaattgaaaaaatacctaattctgatgttaaagttggcgataccgtcaaagtgaaatttagtgttgatgcttgggcaactggcgaagctattccagattgggttaaaggaaacagttataaagtgcaagaagcaactggaagcagagtattgctagaaggcattttgtcatggattagcaaaggtgatattgaactattaccagatgcaacagttgtccctgataagcaaccagaaacaacacatatagttcaacatggcgaaacattatcaagcattgcttaccaatacggtaccgattatcaaactttagcttcgttaaatggattggctaatccaaaccttatttaccctggacaagttttgaaagtaaatggatcagcaacaagtaatgtttacacagtccagttgggtgataatttatcaagtatagcggctaaacttggcacgacttatcaaacattggcagctttaaacgaattagcaaatcctaacttgatttatccgggtcaaacgttgaactattaagaaataagtaaaaggcctacttctctttgtgagaggtaggtcttttttcatttatactaatatatacatatcattgaatgctaaaaaattaaaatttgtcttaagtaaattttcaagttatggtatactttgctggtgaatatgggaaggagcataaaatttgaagaaacattctaggaaaataaaaaataataaagaactaactttactgattataggaatttgggttgttttttttctttttaatatgtatatgccgacagtgagagctgatgacttagtttacgtaaatagattagataaattaggatatttgggtgcttcaatagaacattataaaacatggagttcaagagttattattgaattattcttgatgtttttttctaaacaccttatgttatggaaattattaaattcaacgataatgacaggttctatagtattgctttgcaaatatgttttcaacaagttatattctaaaaatttgctactagttttttctatattttgtctaattcctttaacaataatgggggaaactggttggatcgctactacgttaaattaccaatggccagtagcttttggtttgctagctttttaccctttttttcaagtgttaagcggtaaagaaataagcaaaaaaatatattgtataagtattcctttattaatattctctgctaaccaagagcaagttaacgtatgcttttttgttttaactagtctagtaagtttgtatttattatttagaagaaattataattataagttatcggcgctttccataataagtttagtggaattatttttttctttgacggccccagggaacacattgcgggctgctcatgaaattaataaatggtttcctgaatacaaaaaatttaactttgtgaataaattagaccttggtatatcatcagagagtgtaaaatattttgtgtaaatgaaaaaatccatacaaaaaaggaagtcgcttctgtagaataaagttaacgacaaccaattcacagaaaagaggacttccctatgaatgattttactacagaaattgtgcaaactctagtcactaaaggcgatttaaatgaattattccgttcgcacttagaaaaagcgataaacacactcctacggactgaattaacggcttttttagattacgaaaaatatgatcgcactggttttaattcaggtaattcgagaaacggttcttactttcgatcaatcaaaaccgaatatggtgaattaacattgggaatacctagagatcgtaatggtgagtttaaacmacmaactttaccagcctacmaaaggamcacgrtacattggaaccmctattatccntttatccgaaaag

SEQ ID NO: 469 - DNA, 2005 bp; double-stranded, linear
tttatataaataaaatagtaattggaatggcaatcagcacaatctgtgtaaagccatgaatagtgaattggctgtgatttggtcatcatcgaaaagagnccaatcgcaacggtgtaattttcaactttatcacccataataacttttgcgaaaataaaatccatccaagggcccatgaaggcggttaaagaagtatagacaataattggtttcgacaatggcaacgtaatttttgtgaaaatttgccacttgttggcaccgtcaatcatagccgattcgtctaaagccatcggaatggtgtcgaagaaacctttggcgatgtaaaaacctagcgccgagcctgcagagtaaaccagaattaaagcgaataaactttcagttaaatttaaggcttttaaaatatagtaaacggcaatcatactcataaaaccagggaacatatttaaaacgagcgccacttttaaaaatggttttcttaagcggaaacgcaaccgtgacagcgcataagccattgcgattgtaatgaaagttgataacagacagcttgcgatggaaacgaacaaggtgttcaaaaaccaacggacaaaggggaagttgccagtctgatttgttaataatactttataattttctaaagtgaatgttttgggaatgatatagggaacaaatgcaccgccttcgccacgaaaacttgttaagataatccacacaatggggaacatccaaaaaactgctaaaatggttagaatgatgtaaacgctggtaagtgcagtgcgttgttttttctggtaactttttgctttagccataagttacgcctccttaaatgaattcgtacgtgtataggcaattaaactgaagactgcggagagaatgaagattaaaataccaatcacagaggctaaattgtaatccattgtatcgacagtcaatttgtatagccaggtaactaaaaggtcagttgagcctgcaccgtagaagttagaattggctggcccaccacctgttaatagataaatgacattgaagttattgatgttgccaataaactgttgaatcagcgctggggtcatcacaaatagaatttgtggaaacgtaatacttttaaaaatttgccatttattggcaccgtcaattctagctgcttcgatttgatcttcaggaaggttttggataatccctgtagagattaacatcgtagcaggaataccaatccacatattgacaacaataatggttaattttgcccaattcggatctgttaagaaggggatagaagaatcgattaagccccaatttaacaacagagcattgataggtccagaaccatttaagaggtttcgcataattaaaagtgaaacaaacggaggtacggccatcgtgataacaaaaatagtccgccaaaatgctttatattttaagccttttgtattgataagcaaggctaaaatgattccaaaaaagaaacaagttgcggttgcgaaaacagcccaaatcaaggtccagccaagtactggaaagaacgttgaagccatatcgcctgtgattacattacctagatttgccaatccaacccaagtaaaaaggtttttcggtggcagatggttatggtcgtagttggtaaaggcaattgaaatcatatacaacaacggcaagatggtaaagaaaagaacgcctagtaaggggatcgtcattaaagttgcatggaaacgttcgtttaacaagctacgtaaatcatccatagttgttggaatttttttgccggctgtctttaattcatataggtgacgggcgctttttaaattgattacatataaaatgattagcgataaacagactaaaattgctgcaattccgaataataataagagcattgaattatcgccttcttttagaacttcaatccctaaagaatcatcatatactaatccttgctgttgggtccctagtgttcctagcatcattaatgcgtggaaaccattacggattaaccaatagataaagc

SEQ ID NO: 470 - DNA, 529 bp; double-stranded, linear
ggtccaccaatatatttaggacgagaatataatgctgtaacatgggccgcacctaacgttcgaatgctcaagcgaagaggaacttgcacatgttttacatgcataccgatagatgtgtcgccaatgtcaatccctgcttgagcaacaatatgttcaacttccacaggttcatcaaatttttcaaaggcagccactgaacaagaaccgccagcatgtaattgtggtactaccgagacaatttcaaagcctttttcttcagccacacgacgttccatcgmtaaagcacgattaatatgttcgcatccttggacagccaaagagatgccttttttatctaattgttcaattaaggttgagacaatccattgtcctacttcggcactggaatttttaccaatgacgccacctactacctcactggtggtacaacccaaaacgaataggtcccctttttttaaatttcctgctgtaatgacttcttctgtaattgtcactaactgttcttntaacattttntcatcgatagtca

SEQ ID NO: 471 - DNA, 451 bp; double-stranded, linear
aagttttagtcgtatccacttgattatctggaataatactttctactgtaaaccccattttttcttctgttgaagtaytctctgcttgaacaactgaaggaaagaaaatagataatagtaaaaacgctataaaccccataaaaaatttttctcgttgtttcacctacatcctcctaaaaaaggagaggatgcatgatcctctcccaaaaaatttaccgattagatcgtatcattcaatgaccaagtcaatgtcccactgtattgttgattaatcttcgctgcattcgcaggaacttctagtttaacatttgacatctccatagctgttgatcctawgaagctagcgccgccagttccagcatctttcataacaggcactgcagcagctccagcagtcactgattgtgaagaagcattaacggttgccgtacgtgctcctttatcaacaatt

SEQ ID NO: 472 - DNA, 1551 bp; double-stranded, linear
ttccttgatgcaatacgctttctgcatcaatacgtcctttayagttytcgactaattgtttygcaatcgatagacctmagccattaccacctttatttcttgcacgggctttatctactcgatagaatcgatcaaatattttctccaagtcttcttcagtgattccttcaccaaaatcttgcacagctatttcaaattcattcatcgttcgagaaatggaaatatgcacttcttttcgatcggttgaatatttaatcgcattatctaatagaataattagcaattgttcaaagtgattacgatagattttcagctcaacttcggttggtaaatcgtcatctaatgtgatatgaaactcaggataaaccaattggaagttattaaatacttggtagactacttgtttagcatctgttcgttcatttgcatattgggtgtccacttgttcagcgcgtgaaaggtcaagcatttcttggaccaaactcttcatacgactaatttcttgtaaactggcctttaatgattcatctaaaatttcaggatcgtctttcccccaacgatttaaaaggtttaaatggccttccataatcgcaacgggcgttcttaattcatgggaaacatcttcaacaaactgctcttgttgttcgatatagcgtctcatacgatctaacatttcattaaagatttccgagatatctgctaactcatctctcgtattaatctccggcatgtggacatctgattgcgggtctttgcggattgtatccatcgtgtctctcaatacttttaatggttttaagaaataagaagagaggataaagcctaagacactacttacaatcagagaaatcacttctaaaactacaagtgttaataataaatgattacgaatttcataaaaagaagaaagttcataaaacgcttgaatatagccaatcttttctcgtgtttcttttgaaaaaataggttccacggaataaaaaccggttttatcaaaaacggttcgaacaacaggtaattgtcgatccaattgtaataacttatcatattcattttgtgttttaaaaactagcttttggtttgtgtcatacacagataaataaagttctggttgtcctagttcagatatgaaactgtccatttccataaacgaaccttctactgctgtatgcttattatagtagttttcatctctttcactcggcgtttttaaatagtcaaaaacgtctgttaccgttaaattttcattggcattagctaatcgatttgttacttctgcaatcgttgcttcgacattttccttttctttggcaacaataagactgacagaagacttataggtaatcaccgcaaaaatggtaaaaactacaaatataaagaaagaacttgcgaaagcccactttatagttaaagatgggccttccagttcttttttaatcgttcttttcatnaattagttctcacgaacgcataacgtagccagttccacggacagtttggatgtagctttcttctccaggtacgtcaattttatttcgtagtagcggatag

SEQ ID NO: 473 - DNA, 4120 bp; double-stranded, linear
ttcgtgaatttttgtagctytcaatttttcctaaacgtcgtagcctatattgctaccttaagtatctccctgaccatcggattgaatctactggtacctttttacttaatttatacaaaatcatcgcaattcaaccccaaaggctactttatcaatttaatgacttttaccttttgccaatttctcccaattaaaatgacttttatccaacaatctaaagcatttttagccggattacttctttttttaatcgcagtgaaattctatagctttgtttctcaatattatgcaaaaagaacatctgaaaaaaatgagtttagctttttcgctgatttattgaattcatatggtaacgaacaagaatatcaagctaacttaaacaaattagccaaattgactcaacaattgtatttccaagcatatctttcttctagttctaaaaacaaaattactcctaaaactcgtattgcattcaactatgcctttttatcccaacgtgctctatatttttttacaagtattgataaattggtaaagccagattcaattattgaaaaatggatgacaagaatttctgatttttttgaaaagtccagtcagtttactacgatgtcagttatygaaaaaaatgagttgagaatacaagggaaaatacttataacttctttagaacactccgatgaagtagcactgatacttttaagaaacctgcttattcacagtttatttatattacgtttattggataatgatccagaaataagcaataatcattggtcaacgcctctccmtcaccrgaccaaatatctttyccaacacaaatttagaattgattcatttgaattacgtgttcgcactacgtttcagtatcgttctggctttctgtttttctttatgcacattgactcatattactcgtggaacttggttaccgatgaatgctttcttactgcttcaaccaatgaatgaagagactacttatcgcttaaagactcgttttttaggaaccatctttggatgtttgataagtatctacactgtgcagctctttagcaacaacttactccatctaattttggctagcttattagggatctgtgcctttacgataattccaggaactacatttcaagcaactttatcaactattttcgcattgttcctatcatcattagttatgtctaatttaatggccgctggattgcgctttgtttatgttttattagcttgttcattagtttttctcgtcaatcaattcattcttccaacaggcataaaaaatcaatttcgatttaatttacaagaactttttcatattcatcagactagtttaatattccttcaaaattcatttcatcacaagattgattatggcacaatcgctgacttacaaatgaattatcacttactccatggtgaaattaagaattatttcggcaaaagcgataaattgaaacagatatcctacaaagaatttttatctatatcttggcaaatgattactatagttgaacaacttttactacttattgacagtaaaaaaattacagaaaatgatattacagttattgaaaatacaattgactctctatgttacgtattgtctctaatccaaaacttgttagactgcaatttaaaaacattaaaaatacctgaagtactttttaaacgtgatttagcaattgatcctgaaatagcgtatctgckatttcaatactctaaaaaattatcagcmatgtatcgcctcgtactttgnattgtcattcaattaaatttcgaaaatrttcgataatctactatctaagggaattataaagggtattcttattaaagaatgaagaataccctttaatttaccttttcaaaatctatcctttactcttttatctgtagtgctaatataaatgattgtagagatagtttgtatataaggatatttttgttcagcttaaaggagtttttactctatttaatgattactacatacaattatagaagtacaagtgataacaataagtctatacgcataggraatagycatycattagcaakgmcttcccatttttttgctttttgtaatattaaaacgtattgaaattttgatgtaatcttagatgtaggatcaakatatttaactaaaatatttgtctttattgcttgtccttttttctgataattgatactgctaatttcaacaaactttagattcttataaattggctccaacacatctttttttacataatatcctagttcttctttagaagckgttggatataatttaaatagaacctctaaaaattcttcaatttcttcttwgtkcttttctttaatcatcgaatcatctgtaaactgcttagttttataatttgctttaacaggtttactaatcattgttggcaaagaagtcacaatacaatttccaagtctatcttcaaaaacagaaattcggtatgctgttttttcttgtaaagcttttttttcctctactatttcttgatccaccaaaaatgatacgacgaaccattttgactttttctcaacatttagaattttcactgagttcaccttagaacttgttggtatatctgctctaaccatatcttgacttaaatctagtacatcttttgtaagataatgccctagagaacgtattcttttttcaattgctactctatcatttttccaagagaaatattctttgggcaaatctacagtaaaattttctacacctgagggtattcacaattttttccttcacaaccactttctcatgagttgtatgttgatcaatagcggtgaaatttttgtagattccaaaggataaactactaagaagtaataaccaaaggacaagcaccatttttcgatgcttccccattgaaacaacttgttcttttttctttcccgaaatcttctttttatttcgttctatttttatcttcatcatctgtccccttttctatttttataccgaccagcaccaatgatatgttgctgccaataagtttcggtaagattagtccatccaacgggatcacctgcatggaacatccgattgtctccagcatagatacctacatgtgtcacataagttcctgcatcatacgttgagtgaaagaaaattaaatctcctggcttagcatctttcaactcgatatgagacatagcatcatactgatcctgcgcgactctgggaagttgcaaaccaactttggcataacaccactgcgttaatccgctacaatcaaaacctgttgctggacttgaacctccgaacacatatgccgtcccttcatacttaaaagcttcatcaaaaattccttgaacggttttatcatcaaattcgttgtagtaagatattgtttcactaacattacataaaacatatttccatagttataacgccaaccaccattctccttaatagcgattggattcgaataggtcactttttccccatctgatttttcttttgaaaaagattccgctaaggcaaagctgtacttctttccattttttccaacatagtctaaatatccaccaccatagttatacgattgaatgatgctctcttgatcacaaccgatatcctttgctcgattgactaaggaagcaaaataaatgcacccttgcttgattgaagcttcggtgcttaacgagttaggtggggaatcccgctggattcngaactttggcaycacatcttccatcgtaccgccagactctacctgaataatgctagaagaatcggaacatactctaaatatccgatkctttagcatacttctctacaagtggacgatgctttaaaacttctaagraaacattactccctccagaggacaatccagtactgctatttccttcactatcgtcaccaaataatagaccgacacaaatcaaaattcccataaacaaaaccgttaaaagaactaatagaacggtacttaactttttgattgtcatgccatatcacctgtctttaccttctcccggtttatagaattcttttgatattgcttctttccatttttcgttagagtggattgatttttcatttttttgatactcatcatcttcggtgcaatcttaggataaatggtttgtagggaatcct

SEQ ID NO: 474 - DNA, 830 bp; double-stranded, linear
agaaagaaaacacaattgtctgaancgttttacgcacagacgacacagttgttttggagaaaatgaacacaacaactgatggattaagtgcacaggaggctcaaaagcgtttagaaacgtacggggaaaatgtgctagatgaagggaagaaaaaatcacttgccgtgaaattctttgagcaattcaaagattttatgattattgttttattagcggcagcggtcatttcagccgtcttttcccatgatgtggtagactcgattatcatcttagtggttgttatcttgaatgccatctttggggtcatccaagaagccaaagcggaacaagccattgaagcattaaaagaaatgtcttcaccaaatgctaatgttcgccgtgatggacacgtcattactgttaaaagcgatgaattagtgccaggtgacattgttttattagaagcaggggatgtcgttccagccgatttacgtttattggaagcgaatagcttaaaaattgaagaagcagcgttaaccggtgaatctgttccagttgaaaaagaagtaaccatcttagagggaaccgatattggtatcggtgaccgaatcaatatggcttattccaatagtaatgtgacgtatggacgtggtcttggcgttgtggttggcacaggaatgaatacagaagtcggtaaaattgctggcatgctagcaagcgaacaagaaacggaaacgcctttaaaacaaaacttaaaccaattgggtaaaatgttaacaattgccattttagtcattgcagcggtgatgtttgtggtaggaatgatgartggtcgtcatggattgacatgt

SEQ ID NO: 475 - DNA, 1219 bp; double-stranded, linear
ttgttcattttttttgaaagttttgagaatactatagataggagtttttttatggaggaagatattgtaaggntgttttataaaggatctgaaattattttaattgggaccagtcatatctcagctgaaagtgctgatttggtcagaaaaacaattcaggaagaaaatcctgacactatttgtattgaatgggatcaaaaaagatacaaaaaaaacatacatccagacgaatgggatgatactgatatagttaaaataataaagaataagcaatttccagtttttatttttggtgtaatttacaaattatttcaaaaaaaagtttctcaagatatgaatagccttgtaggaaaagaatttgtagtggctgttgatgagtcaaaaaaattaaacataaagttttatctaattgatagagattcttctcttacttttaaaagagcatggaggatgttaaattttcgtgaaaaagtgaaattaccatatgcttttggaaaaatatttgagggtgcggaagaaactgaagaagrggttcaaaatctgctagaatckgaaaattttgaacctgtttttgaagaattgaaggagtcctatcctaatttgtgggaagttttcgtaactgaaagagacgattatttagcaacaaaaattcaaaatacagcgaatggaaagactgttgctgttttagggaaagctcatttaaaaggggtttctgacagattaaagaataatcaaaaatccgatttacaaaaattagagattattccacccaaaaaatttggaagtaagttgcttgaatggattataccaggtatattacttattcttctaggagtatccttttaccaagggacacaagtgggaatagagcaattgttacgttggcttttatggaatggtggattagctgcattgtttacagtatttgctttaggacaccctttaactgttctaacgtccttaatatttgctcctttagctactttacttccaatggtttctgttggagtattttcagcaatagtggaagctactgttagaaaaccaaaagtaaaagattttcaaacgatggatttagatcttcaatctattaaaacaatatacaaaaatcgtgttttaagagtgtttttagtatttttcttatcaagtcttggagggcttttaggtaatattattggtgggttaggaatagttaaaaatttantttaaaggagtgagt

SEQ ID NO: 476 - DNA, 943 bp; double-stranded, linear
atatttttgaaacgtttgtttagttacaacacgtgttgctaccaccaagccttggtaaattaaatagtatttgatttttttctgacaaggtaaccacatcagttgccaatctcgttggttagcttgactaattcgttgattttggtttgcaaagcgcgtcagaaagagccaatcttccttgagttttgccgctttttcgaaggcttgtttttcagcagcctcttgcatttgttgagcaattcgtttgattggttctcgtccttgattatggaaaaagtcgaacaattcttgttgaaatagttcggtcggaatggcactctctttttgaaaggtttgatgccagtagttggttgggacgagatcgtagatactatccaaaattatttttaaacggtttaattttcggcgaatcgaataaggaccaaaacagttctctttagtgggaatatttaagagtttaatctctaattgccgctcattaacggctaccgatacataagaatattgttcataagcattcatttggcgattgtagcgcggccgatactgttgaatcagttgacattctaggaggagtgcatccaattctgtgtcagtatggagaacatcgaagtctataatttgtttgactaaacgcatcgtctttcgagaatgttgattactattaataaaatagctcgacacgcgattttttaattttttggctttacccacataaataattgtgtcggttgcgtctttcattaaataaacacccggtgttaacggtaattgatgggctttttcctttaaatattctttcataagtttcctcttttcttaaaaggatcggcttcaagtatacaaagttttctgaaatagtcaagtaacagaaatagncataggtaatttcactgaaaaatagttttcattttttttaaaatatggataattcnagggaatt

SEQ ID NO: 477 - DNA, 908 bp; double-stranded, linear
atagatgtcttttctgtctctttttttgtataataaacttatcaaatgatgtgtatcttacaactttgttcgtttgcagaaagaacaaacgatgttttttattgataaaaagttatatactaaaagtacgatgagtataactaaaggagatgagaaatgtgagtgttaccctatctagaaaaattgttaatattatttccattttgggcattgttgcaaccataattgcaaccatctattttatccgattaggtgtcttcaaggacatcaatgcactaagaggactagtagggcaatctgtcattctcggtccgattattttcatgttaattcagattattcaagtggttattccgattattcctggtggtgttagctgtgctgcaggggtcttgattttcgggccaacaatgggcttcgtctataattacgttggtattgcacttggctctattatcattttcttattaggtcgtaattatgggaaaccattcattatgagccttgtcagtgataaaacatataacaagtatatcggttggttagacaatgaaaaacgttttgaacgattgtttgctttancaattttcttcccgattgcaccggatgatgcgctttgtttaatggccggtttaacaaaaatgtctgtgaaaaaatttactctgattattttattagcaaaacctgcttctatctatttatatagtcttgcgttaatttatggcggtacatttttaactagcttactgggaatgtaaaataaataaaaaagcgaacggactaaatcaaaactctgcctgtgtcagtttgatttagtccytttawtatggaattttggtagaactgggggrcttttgawgkttagttattttaaaaatagtattgkgaaacgcccagattttccttaa

SEQ ID NO: 478 - DNA, 605 bp; double-stranded, linear
cgaacgagatttaaaaaaatnacgtagcctttttacaagaacaaggcctgcattcttgggacgaagttgaccgttacatgattacagaatttttgcaatcccttcacgaagaacagcaagcttcagcaagtgtgattcggatgatttctagtttgagaggatttcatcaatttttacgtcaagaacgcttaagcgaacataatccgatgcaacatattgactcccccaagaaagttcaaaaattgccaagtacattatctgttgacgaatgactcgattaattgaaacgcctgatacaagtaaaccactaggtatgcggaatcgtgctattttagaagtgatgtatgcaacgggcctgcgagttagtgaactaattgaaataaaattaggggatctgcatttatccattggtttattgcaaacaatcggaaaaggggacaaagaacgaattattcctttaggcgattatgcgattcaatggattgagcgctatatgaacgaagccagacctcaattgattaaaaaccatccgaatgaaacacacctgttcgttaatcatcakggcgaaccgttatctagacagggcatttggaaaaatttaaaac

SEQ ID NO: 479 - DNA, 955 bp; double-stranded, linear
tggcgtcgttcttacgatactcttcctccattaatggaagcaacagatgaaggttctgcagcaaacgaccgtcgttatgcaatgttagaccaacgcgatattcctggtggcgaaaacttgaaagttactttggaacgtgcattaccattctggcaagatgaaattgcgccagctttaaaagacaacaaaactgttttagtagcggctcatggtaattcattacgtgctttagctaaacacatcgaaggcatttctgatgaagatattatggatcttgaaatcccaacaggtaaaccattagtttatgaattaaacgatgatttaactgtgaaagaaaaatactacttataagaacttgtttcttattaacaaaagcggtttgccaaggcaaaccgcttttttatgggattaaataaattgactttcggktaaacmatctttataaaycgctactawatccgctgcatccaatggtacataagccttttcggcaattgcactatggtccacagcttgttgtgccatttcttcaaatttatctgcttcgatgccaacttctggtaatgtcattggaatgccacaagccacaaagtaatcatacaatgcttgaataccttttttcgctgctacttcctcctcttgttcgactattccccaaacatttcgagcaaactgtgcaaatttgcctacggtttgttcagacaaaacgtaattcatccaacgaggcgttaaaattgctaagccaatcccatgcgtaatgtcataaaacgcacttaattcatgttccattgggtgacaagaccaaacaccttgtttgccgcgccctgttaaaccatttaaggstaaactamttgsccacattaaattagcacgtgcatcataatcntcygggatttcyaaaggcaataggrcaattttgataacsgtcgsattaagccttctgacacnaaatctt

SEQ ID NO: 480 - DNA, 3604 bp; double-stranded, linear
ttggcttttatctgtgttatattttttttagttacttttactattgtgtcactaccattaatcactgctcttaagacacaaggattttcttctgaagaattaattgaattagctaattttgatttaaatgttgatatccctttttctgaactaaacgtctcaattatttyaattagtttttctggtgccgttattgacggaagtatggctatttgtagtyctacttacgaaatatatacgaagaacccagatttaacttttaaagaactatttaattctagttttaacgtagtaattgaggtattaaattcgactatatacactctcttatttgcttttatagcatctaattttgcattagtaatttacttacaggatttaaactattcatttttagaattaattaattctaaaatttttgtaggggaactattagtaagtattttaactggttgtgcaggaattttaattttacctttgtcctgtttactaggtagctggatattaaaaaaaagattccacactttgtattgaaacccaaaagctaggccgaataccttttatagaaatatatttggtatttttatacaattaaccgttcacttatattgaacaaaattgcagccaagtttcgttttgatttattggtgattgaaataattaaatccatttgttatgtaagtcttgattagtgtgaaaaaacaccctctaatccagtccgctcttttccaaatacttaaataaaagaatccacaactaatttatctgttattctatgtaatatactcaacaaaattcacagtaacttaactatgacttttcagtaaaaatcaattgtgcatactgatacagtaagtttaaacttttattgtaatagtataattcttaatttatattttttacttctattcctaattgatttattcaaaattatcacaaaatcgtaaaagttaaaattgcatattctaacacaagaaaatcaaaaaaagattttcttgtgttaatatttttgaatatactaaagttcggataagtagaaaacaccctactgatttatataatagtagggtgttttgttaatataatttacttaaattctataactcacagtctataatcaccttttattcatttaaatttaatccgataacatacttaactctacgtcaaagtataattttaccacacgaatcaccatatatagttgtataactatttaagatgacttcattaacttgttcaggtttagtaaaaacaactatgacagatggatcttttcctgcttgtttaatttgatcaaaatcaacttcggctaataatgtttcggtagtaactttctctcctgcattaacaaaaattgaaaaaggtttaccctccaattcaactgtgtctataccaatatgaattaaatactcaatatctgcatcgctttttatactaattgcatgctttgttggaaaaacagcttcaattcgtccagtcaaaggagcatatattttgttaccttcgggaacaactgcaaatccttctccaagtactttttttgaaaatattggatcatttacttctgaaataggaataatcctccctgaacaaggagcagtaatggaaattccttcttgttttttatttttaaatagattaaacataagatatctcctaattctcaatttctaaaatttgattaatttcttgactaagtaaatcagctttaccgccaaaaactgcctgaataccaccattcacttcaaaaacagcagtagcacctagttgtttaatagtttctttgtcaaccattcggccatctacaacagctaaacgtaaacgagtagcacaagcttcaacgggattcaatattggttttactaccaagagctttaatgattatttgagcttcatcatttaatgatgtttttttatttaatttattttcagtagtcgttggcaactcttctcccattccaggaatagctactttaaatttcttaatgaagaaagtaaatacgcagaaataaacaattgcccaagcaattccgaaaggaattaatttcagccaatttgtcttatcgtttccttggagtacaccaaataataagaaatcaattaatccaccagaaaatgaatttcctactcggatatttaaaatatcagcaaaataaaaagatagaccatctaagaatgcatgaattatatataaccatggggctacaaataaaaacatatattcaactggttcagtaatccctgttaaaaatgaagtcaagccaccactaaaataaagtccaccattctttttacgattttgtttaggtatagcacgatacatagcataacaagctgctggtaaaccaaacatcattgtcgcgaatctacctgcaaagaaacgagtaccataagtaaatagtcctgtatggtttggatcagctagttgcgcaaagaaaatattttgtgcaccagaaacagtaactccagctacactttctgtacctcctaaagacgtwtaccaaaaaagtggataaatagtatgatgtaatcctactgcgccagtcaaacgaagtaaaaatccatacaaaaaagtacctagacttcccatttgtgcaatatgttctccaactactgctaatccattttgaattggtggccaaattaaataaaagaaagaaccgataataattgccgctaaactagaaatgattggaataaaacgcgatccgccaaaaaagcccaaaaattgcggtagttcaattttccgatatcgattgtgtagaaatgcaacagttccgccaattacaatagatccaacaacaccagtatcaagagttgcatctttagcagaaaataacgcaagaaagccgctgatcgttgctgtatacactaagtaagatactccaccggctagacctgctgttcctttatccccatttgctaaccctacagcaatacctatagcaaaaatcaatgctaaattagtaaagacagcatttcctgcataactcataatacttaatactgtatggatccatggctgttctaaaattggatacgcattcattgcactttcatttgttaaagcaccaccaaggcctaaaagtaaacctgctactggtaagattgcaatcggtaacataaatgcgcgacctaattgtgaaaacttcttaaacatctttttcctccttattcaatgcatcgacaaatcttttagcaatttcttgtggtcgtgtaattgcaccaccaacgacaattcctgcaacacccagctttttaatttgtcttgcttgttcaggtgtatgaattttcccttcagcaataacacaaatattttcttgtactaattgtttaattaatttcatatctgggccattttgttttttgctctcctttgtatagccacttaaggttgtaccaacaaaatccacaccagcttgataagcattctttccttcctcaaaagtagaaatatcagccattaataattgttgaggatacttttctttactttttctataaargtattaatagataatccgtcakgacgttacgtaaagtacagtccaaagcaattacctccacaccaattgcactaattcactactcccccatagtg

SEQ ID NO: 481 - DNA, 646 bp; double-stranded, linear
gcgcatggttatatgggttcggcagaaacgatgtctgtctttgcgaaaatgtatcatgattggggctacaatgtgttagcgccagatgcgcgtggtcacgggaaaagtcaaggagattatattgggttcggctggcccgatcgtaaagattatgtccaatggattgagaaagttttaaccgaaaatggtcagcaagaacaaatcactttatacggtgtcagtatgggtgctgctacagtcatgatgacgagcggggaaaaattaccagataacgtgaaagccattgtggaagattgtggctattctacagtcaatcaggagttgcaatatcaattgaaagagcttttcaatttaccaagtttcccattagttaatgttactagcgggattacgaaacttagagctggctatttctttggggaagcaagcgctgttaaacaattacaaaagaatcatttaccaatgctctttattcatggtgaaaatgatacgtttgtgccgtttagtatgttagacgaaktttataatgcaacccaaggacctaaagaaaaatatgtcgtgcctggaggcagagcatggcgaaagctttataataaaaacccagaaaaatataagggaacagtangcggcttttcnagataaatat

SEQ ID NO: 482 - DNA, 1322 bp; double-stranded, linear
aaagaagaattaatattattactgaatgataaagattgtgcctatgatgtacggattcaaattcaacaatttcttgaagaaaggtgagtaaagacaagatgttcagaaacaaatggaaaaacagttcactaattaaaaatgtgtaaaaagggtctgatgaaaaaaggagacataatagttattatctttttaatagctatctctttttctccatattttattttttttcacaataatccatttaactccaaaagttttgacgacactaaatatgctgtggtcaagatagatgggaaagagattgagcgtataaatttagatgattcaaaagaatttatcaaaacatattatccatcaaaagggcaatataatactatagaagttaaaaatgggcacgttcgtgtaaaaaaagataatagtccagatcaaattgcggtgaaaacaggatggatatcagaaccagggcmaactagtatctgtattcctcacagattcattttagaaattgttcaacaatattctaaggattattatatttactaaaatcattttttggcatacatgctaaaaaatgattttttgtaaatattttattgcattaatatcaatatagtttagttttatttggaagaatgtaataacaaatatgagatgggattgtccttattaaataacatttataaatgttatattttaagtgaaagtaatgatttacagttaattaaatggaggttttatgaataacctatttatttttgtttgcttttgttttatgtggttaatgatttttggagtaattttatactatgttggtctagttaatcacagatatatacatcatactttaattttgggtttagtaactattatttctggtactctatgttggttatttgtaggatactcattaagtttttttggaaatattcaatatagtatcktttatagccccttagcttctagtgaaattgtttctatactgatacaattacttttttgcttatattctgtaattatgataattggttcagtattagaaagaggtaattggaaatatattgtgttgtttgttcctttgtggattgtatttgtttatgcacctatttgcwtttcgttatggggacatggaaattggctagggaaaatgggagtactggattattcaggcggactagtagtccatactaccgctggaataggaagtcttgttttagcaataacatcaccaatacgtttaaagaattcattgatatttaaatcacaagaaatgatagcttttgtaggaatgctgtttattaccttaggatggttcggatttaata

SEQ ID NO: 483 - DNA, 1268 bp; double-stranded, linear
gacctggtttggatcggattaatgcgttattagaaaaaattgatcatccagaaaacaaagtgccaacgattcatatcgcaggaaccaatggtaaaggctcaaccgtgacatatttacgctgtctattagaagaaatgggcttgaaagtcggaacctttacctctccttatattgaatcatttaatgaaagaattgcgataaatggtcaaccaatttcagacgaacaattgattacctatgtggaaaagtatcaaccaatcattaaagaattagaccagatcactgaagtggctggaattacagaattcgaaacattgacaggaatggccttggactatttcgtgaatgaacaagtggatatcgccgttgttgaagttggcttaggtggattacttgatagcaccaatgtcgtgaagccattattgacgggaattacgacaattgggaaggatcacacagaaattttaggtgaaacaattgctgaaattgcctatcaaaaagcgggtattattaaagaaaaagtcccagtagtaacaggcaacatttgtgctgatgcgctagcagtcattgaaaaagtcgcacaagaaaaacagagtccaatttttcgttttggcaaagagtatcaagtggaatatctacatcctgatacacaatggggggaagtatttaatttctatggagaaatgggcaaactgacaaaaattaaagttcccttgttggggcgtcaccaagtagaaaatgcggcggtagctattcaattatttgacaagtattgccaactacaacatttgccatttaaagaacgagacattactcaagggttggctaaagcgcaatggccagctcgaatggaacgtcttagtgatgaaccgttgattgttttagatggtgcccacaatgatcatgcagtaaaacgcttagttgaaaacttgcgcaaagagtttccacaacacacgattcatattttattttcagctttagcaactaaagatgtggatgagatgattcaggacttaaagcaagtaccgaatgcgcatctttacttaactagcttcgattatcctaaagctattgcacttacagaaatggaaaaatatgaagacgatttaacagaaattgtgtctttatggcaatttggcttaggcgaaattttagaaaaaatgtcgacagatgatttattattagtaacaggttcattatattttgtttctcaagtaagagaattacttttaactataggaggaaatgatgaagaaatttgatggcgt

SEQ ID NO: 484 - DNA, 1217 bp; double-stranded, linear
naagcaataattgaaccgtaaattgcaccaacccctttgttcgtaccaatcatgattaaaggcgcaactgcttgaatggcacaacctaaaacgactggcaagccaatcccaaaaaacttattcaccgttaattgtaaaagtgtcgcaacgccgcacataaaaatatcgattgaaatcaaatacgtcatttgttgcgaatcaaaattcaagccggttccgattaataaaggtacggcaactgctccagcatacatcgctaataaatgttgcaatcctaaaacggcggctttcccatttggtgtttccgtctgttgtggtgtattcaattgttttgtttccaagattatgcatcctcctctaaaaacgtcaccgttccttcacttaatgaagcaatacgtgctaaagagactacatttaagcccatgtcttctaataactgacgaccatcttggaatgatttttcaattacgataccaattccttcaacctttgcaccagcctgttggcataattctaccaatcctttggcagcttgtccgttagctaaaaagtcatcaataatcaacactttatcagcatcagataaaaattttcttgaaatggaaatttgacttgtcacttgttttgtaaatgaataaactgaagccgttaaaagctcttcatccatggttaaactttttgccttacgagcgaagatcattggcacgcctaatttttgcgctgcgtataaggcaggagcgattcctgatgcttcaattgtaattactttggtaatgcctgcttctgcgaaaacctcagcaaaacgattacccatagcctccattaattctggatccacttggtgcgtaataaaactatctacttttaaaacaccttcacctaatacacggccatcatttttaatacgttcgactaattccttcacaatatgaactcctttacttatttttcgatagatgctttgttctcatcctgaggaaaggacggttcgttaaaaacgaacgaaataaaacaaagtgctatttatattcgtgttctaacaaaagaaraaagcccattttgccaaagcaaaaaagggctatccgctcttcttcacttatagaccagcatttacggtgctgggtagaganggtcaaccgtattttgaccttatacaagcttctatgtgtctctanggatagtacaaaaatctctaactntccaatgggtaacaactt

SEQ ID NO: 485 - DNA, 1929 bp; double-stranded, linear
aaccatcccctaaggattgattcaactaacgctttacggtcgattgagtaagaaattgctttacgtaagttcgcatttctaaatggtgatttttcatcacgttgatttagttccatatattgtgttgatgcttctttttgactaacaaaagctgggtcattggccatttgttgggctaattcaccagaaagaacgacatcgtctgtttgtccatcttggaacaagttcaacgcggttggtgattctttcacgacattcacatctactgagtccagtttcacagtatctttatcccaatattgatcgtttttcttgaatgaccattttgtatctgtaccaggaccatcaaagccgtctaagacgaatggaccattgtagacagcactttcgctgtttgatgcataatttttaccatatttttccacaatgtcttgacgttgcgggaagaatgatgggaaagctaataagtaatcaaagtatggtgttgctttttctaaagtgatttctaattctgtatcactgactgctttaattcctaattctgatttatctttttcccctttagcaatggcatcaccattttttacagaggcatacagataagcatattcagaagctgtcgctggatcaactgttcgttgccatccgtaaacatagtcattagcagtcactggtttaccgtctgaccattttgcatctttatttaatttaattttgtatgttagtccatcttcagaaacttctgctttttccgctgcacctgcaggttggactttgttatctttgtctaaacgataaattccttcatatacattatttaatgcaataaaactaattctgkctgttgctagtgataaatcagctgttggcatttcttgttgttctgtgacacgtaaaacttgttcgccacttgccttaccgccaccagacgcgcttgagctatctgacgttccgccgcctccacaagccgctaaagttgttacgctaaataatgtaatcacaccgaatgttaatgactttttcaatttcatagtgttgcctcctaaaataatgcaatctgtattttctgaaaaatcagaakttaataattattatkgctatggaatatatcttacatttttcatattaaaatgcaagtcaaatgktaactttttttaattttcctccctatcagaaaccactctttttcttcctgtcttttattgcaattcttttgtcagttttctaaacattatggtaaattaggaagtaaaggagtgacaaaatatgaaaaattctacgtttttaaaggatttgtttgctattgataaagcaaatgacgaattatttcggttagttggtgtcgcaatttgtatggcaattccattattaattggttatttttccaataatttactcattgggacctttggctcgatgggcatttatacgtttatttattatcagccgcttcctttgcctcaattattgcgcagactgaatattgttggcttttttattgttctgggcaacagcttaggaatgctaagtcaccatgtaccttggttgattcccattacaattgccatcgtcgcttttcttgcacgcttactttttagattgtatggcattgagaagcctggtgctttgttagttatcatgtcaaccgcaatgggaacaagcaacaattttcctttacataagattcccatcatggccagttttgttcttttaggagtagtgaccggcattatcatgggcattgtgcttcatttcatcgacaagcgcccctacgtttttcaaaaacggatgtctcttcaagaacgactttatatcgatcccgcttctttattagatgctttgcattatgcggccattttatttttagcggcttatttaagccaatcgcttcatttagtcaacgcctattggatgacgtttacttgcgca

SEQ ID NO: 486 - DNA, 3893 bp; double-stranded, linear
ttggtgattacgactgcattcagtatttctacgatgtttttcaatatttcggctacctatcccttctttatggtagcttttctacaaattgtgacctttgccggtatctatttcaaattgggtgacattatgagtatgttcaaccttcagagtaatgacagtcagtcaatgggcagacgggtcatgcgaagaccgcaaatgttgatgaaccgtaaattgcggcaactcaatcgaaatgtgggccgaactctggcttttggcggtgctgcagcagttgggaataagttggcaaaggaacaatcaaaacccaaatttaagccagcaggttcttctctacgaaagaattcacgattacctaacgatcgcgaggtatcctcagactcggctaaggagaatccaatttcaaataataagaaacaatcccgaatgaatttgactgggagaaaaataggcaaagttctggatacccaggctttggtgaaagataaggcaaaacaagtaaaggatcaggtacggaatacgccgaccaacttgaaatacatcctccataaaggtctggaaaagacgaaaaaagcaccgaaagaatttaagcgagggcttgttcaagaaaaagcagatcgagagaagctgcgagacaaacaacgacaacgcagagatgagaaaatggatgaaaagcgaaaaaacttgggcgaagtaacagaccgtcatggaaaaagaagaagtaatgtttcgataaaagaggatccaaaacctcagaaggataggatactgaaaaatgaacttccaaaacggattgtgatggtaaaaccgaattctgaggtaaggagaagacttgttaaacagaatttggttgcgagagagaataaccaactattaagtaagaaaaattctttccagcaagttaagcaacgatctactcttccgaagagagccaatcaaaaagtacaaagaataatgaaggctcgtccaaaaccaaagtcgggtgataaaaaatgaatttaaaagaattgagtgtcatttcgttaaccatgttgatgctctcttttatgggcatcttgatgtgtgtaagcttattgtttggggaagatagtgaggggagtggtacttctggtatttctcctggtggcaatagtgtctcagaagaagtcttgaaacatcgctcaatggttgaaaaatatgctaaagaatcggacatattagactatgtaccaattcttttggcaatcatccaagttgaatctggtggcacaatggaggacgtcatgcaaagttctgagtctgcgggtttaccaccaaattcattaagtaccgaagcatctatcaagcagggatgtatttattttgcttccttggttaagagctccaaagaactagggtgtgatcaagatagtattattcaagcctataactatggtggcggctatttgaattatgtcgcaaaaaacgggaagaagcatagttttactttagccgaatcattttcaaaggaaaaatcgggtggtcaaaaagtagactaccccaacccaatagcgattaaagaaaatggcgggtggcgctataactatggcaatatgttttattgcctattagtgaagcaatacctgaccacgacacagtttgatgataaaacagtccaagggatttttgacgaggcttttaagtatgaaggtactgcctacgtatttggcggttcgagtcccgcaacgggttttgattgtagtggattgacccagtggtgttatgccaaagttggtctgaaacttccccgggtggctcaagatcagtatgatgtcatgactcatattgacttaaaagatgccaaacctggtgatttaattttctttcactcaacctatgatgccggtacttatgtgactcatgtaggtatttatgcaggagagaatcgcatgtttcacgcaggaaatccagtgggttggacgaatcttacagaaagctattggcagcagcatctgattggagccggccgatacaattaagagaaaagaggaaaaataatgaagataaaaattgaacggattcaaaaggaaaagatgtcaaaaaagaaaaaagagcggacaatttcagtgggcaagcatcgaaaaatggtgcttgccctttggcttttactgtcatgtagtcttgcttttgggtatctacaaatatttcaccgccattgatcagcatacactcacgtaaaaatggttgtaaangaaaargtaataaatacttctggagttgaaagttttacaaagaattttgtgaaagaatacttttcatggaagaataacaaggaagtaattgaaaagagaatgagtaatcttggacagtaccttacagaagaaggccttgctttgagtcaagatatggttcgagtagatattcccactagttcagaagtaaactcagtaaaaattctagatgttgaaaaacgttcgaaagattttgtcgtttcatttttagtagaccaaaagattacagaagggaaaaagtcagaacaaatttcttctgcgtatcgagtgaagatatttgaagatgaaaaagaaaatcatatagtgacgagtttaccaactatgattagtaagccaggtaaggcaaaatatgaagtaaaacaagtagaaagtgattctgacattgatgcaaaaacaacgcaagaaattactgagtttctagagacatttttcaaactttatccaactgcttctgaaaaagagctagagtattatagtgaaaatgaatctatgagccaagttagtagcgatcttagatttgtagaaataaccaatcctatttatcttgaaaaggacggttcggtacaagtaaaaatcgtagtaaaatacctaaatgaaattgaaaaggtgacaaatagttttcaatacaatctattgttaaacaaagaagaaaattggaaaattattaatggagaataattttttaaggagaatataaaaaacaaggaaagaatgaatcattgtaaacttgtgggagcgtcaataattttgtgtaaatgattcttccctactgcagattgtttctaattctcaatcagttggcttagcatttgttcaagttcgccttcggcctgttgaaagcctttatgactgcgacctaggaatttttggttgtaagtatcaaaagacgagactaagaaacgttccatcgactcttcgttttggaactgttccttgcggtggctgtatttcttgatttgcttattaaaggattcaatcaagttcgtagaataaatactcttgcgtatggccaaggggaaatcatagaaagtgagcaagtgatcgttcgaaagaatcgattcaaccacttttggatagctggttttccatttttccgcaaaagcaccacgtgcttccaacgccacctttttagatgaggtttgatacaccattttaaaatcatcacagacttccttacgatcatcgacacgcactttgtgactgatattacgggaaacgtgtacacaacaatgttgaaaacgagctttgggatagaaccgactaatcgctcctaccatcccctttaagccatccgtgatgaacaggaggacatttttcaaaccgcgctcttgaaggtccaataaaatttcctcccaaatcgtgatggattcagtcggtgcaaycgcatagctcaatacttcctttgatccgtccgggcgaatgccaactgcgatatgaatggcttccttggcgacggttttccgctttaacggaatatacgttgcgtccatataaatagcggcataacggtcatgaagctcccgccctttaaacgccgttacctcttctgtaaatgatttkgttatattggacatggtttggggcgtgtagtgatgcccatacattttctcaatcaagctgcgatttcgacatggtaataccttg

SEQ ID NO: 487 - DNA, 601 bp; double-stranded, linear
ctcgttcatcttatccagcaccgcccgctgtgcaggggtaaggacacggggcggggtgatgcgtacccattttttcggcagttcaaaggaaagcccgccatatccattatccccggtctgccgtacctgttcggggtaagtgccgcacagttcggaaagctgcctgcaaagactggtattgtgggtgtagatgctggcggcggtttctgcttcgttatacagcacgatagtttccctctcggttccggacagcttcatcgctccacctcctgtccgcgcggggggttctccggcgcgtcacggcctttggcggcatcttcccggcactggttcagggcatccagcaccgagggtttgggcggctcgttattgatgatcccgtcaatctggttatagttgccctccacgctcatttcagcggcggcaaggtaattttcggggattacttcctgaaaggcgcggacgttcccgtcccccgccagtaccggcacatagagccgcccggtctgtaaatacatcccgtccaggccagccccgcctttgtagcgtcctgcgtgtcacgctcacactccaaaagggcaatcccgtttgccagaagata

SEQ ID NO: 488 - DNA, 2109 bp; double-stranded, linear
actcttctgctaattctaaaaatacttgatcaaccacttcatcaccaatcgaatggcaatcaaaatgttcaggataatgtccagttagttccttaaagcgcgtcaattgcgcaatcgtttcaagtcgtacttcttcatatacgaaggttacttgcttttgttgacgataataagaagagcgatgaaaattgccttgttcatctaccagtgaaggaatcatacatgggtccgcacaaggtttccctaataaaaaattcgtatgctgacctacaaataatcctggataattttttgctaacgcaacggcgtgttctgctgttggtaaattgggcatcaaaagtgtcgacgttgttaaaccatcgacataacttttgataatgccatgattaatcgcttctgacatcccaaaatcatcagcatcaacaattactttaaccaacagctccccctcttttctttacgtatttttgatgacaattccgacaataatattaacagctgattcacaatcattaatcgtgcgctcaagctgatcataaacatctttccacttgataactttcaataaatctttttcgttagtcatcaaatctttcatggcgctactgtataatttatcgccttgagattcaatcgtattcacttcatcaatcaatgaaactaacgttttggaattcttaaattttgcaaattccttcgttgctgatttaacgccttctgtcgctttaacaatataagcagttaattctagcgcgggcgcaatcatttcttcgacaactaaatgatcaagtaaataagacaaactattaatgctatcaataatgttatctaagtgatccgtaatatcgacaatatcttctcgatcaatcggcgtaataaaggaaatatagagttcatttaaaattttgcgaacaatttcatcattctctttttccaattgatgaatcgcttctgatttttttactaagttttctaatgaataattgtctacaatttcttgcaaaacctttgccgcttcataagcatttgttgctaactggtttaattctccaaaataatcaaattgttttttacgtgccatgtttttctctccttaaaaaattgcaataaataattttgacatcacataagcgatcrgcccacatcctgggaaagttaaaatccatgmwatcagcatttctttcacgatacgccagtcaacacttgagattcgcttagaagcacctactcccataatcgctgttgtttttgtatgagtagttgaaactggaatcccaaaagccgatgstwaaaataaacaaatagccgtgcttaaatctgcagtgaagccttgatagcgttcaagttttaccatatccatcccgactgatttaatgattctcatgccgcccacagaagttccaatgcccattgtaatggaacacrgaaccatacccataacggatcacaaaaccgccactgttttttcgactaaattattataaaaaagcactaacatgaacacgcccataaatttttgcccatcttgcgcaccatgtaaaaagcattagctcctgcaccaaggcttgtccaactgtaaaaaatttgttggcttttcttctaggcacagccgagaaagctttcacaacaagtttggcaattaaataaccgccgccaaagcccataacggtagaaacaactagaccaacaagcactttgatccattccgagccattgactgcacccaaaccacctaatgccattgccgaaccagtcaagccggcaattaacgcatggctttcacttgtgggaataccaaaataccacgcagcaactgcccaaaccacaattgaaaaaagcgaagcagccaaagccacctgtgaagcgtttccatttgcgtcaaaactaacaatgttactaatcgtttcagctacttgggcattaaaaaaggtcatgactaatgcacctaaaaagttcatcacaacagccatccaaattgcgacattcggttttaacacccgagtcgagacagcggttgcaattgcgttcggcgcatccgtccaaccgttaacaaaaattacacccattaccaaagtaatcgttaccaataatgcaatactcacaaagaca

SEQ ID NO: 489 - DNA, 7712 bp; double-stranded, linear
gtaaattcacttcaattgccccttccttctcctgttctattttacgttatcttgctggcagtgtcacgaaaagaagaaaagaatctggaataattgccgtttgacagtttatccagattcttcttacaccatttctaacgatacgtaatccctaatgtaacatccttacgaattaaaactggcgttttttccagtgttaaatcggcgccatcgacttgaatggcgacgttatttgaggcgcctagaatcagtgttgcattggcggcattcgcaggtaaagctgttgtttgggtctctcctgcttgcagggtgtgttggtacgtatagttgccatcgaccatcacgccaatccagcaagagccttcagtccctttaaaggtaatgttgattggactattcgcatctttaaccgttgcagtcacttgattgttagcatcactcaccacagccacagctgttttcttctctggttcgcttgaagaagacggcggtgtactactttgtgtgctactttctggggcttgacttgattctttgggcttttccacactggcactagttgccggtgtttgaataatcggttcggctttttgatcttgccacataatgtacagcaccacgaccgcaatggctaaaccaattaacgaaaaggcaatggccggtaagttccgcagtaaccaactggattgcttttcttcgtcatgcaattgcttacgtgatccttcaagctcttcatacactggcttgggttcttcgacaattgctggttctttgccatcatagatatctaccaattgattgccatctaagccgaccgcacttgcatattggcggataaacgcccgcacataaaaggtgcctggtaaggactcaaaatcgttttgttcaataatttctaaatatcttttttgaatttttgtcatttgttgcagttcatcaattgagatgttcttctgcaatcttgcttcttttagtgtttctccaatatttacgctggccactcgtccatcttctccagtctattttgttaatttatcgattgtctcatcagtctttttcaattgccaaggaaaacattcccgtcctttaagaataccacaaaagaagccaactgaggataacaaaattgaaagatttcaaagatttttctttttcttaaacagtkggtttattgctcggtttctcctttaggatacatgtagaaacggctcaatccttcttcacgaataaaggtctctgctacttggcggacgtcggctaattgaatactttcaatgacttcaatcttatcaaacagcgtggtttccccaaacaatgattgtgaaaattggttggcgatatactctaaagagtttaaggattggaaatatttaccaatcatttttttcttcaataaggacaaattttcttccgttaattctggacttgttgtggcagataataaaatagcttcaattcgttctgctaagacttctggttgctcactatcgccgccaatatccgcaaaatggaaactgcgatctaaattaaagtcataactaaaactatcatctaacaagccttcatcataaagagccaaatagttttgagaggtattaccaaacaataattgtaacaacaagttcacggtgacttgatatttcattaagtcacgacccgttgttggcacttcatctaagcctttcaaaccaacaagcacttttgcccgtgtgactgtcatttcaatggcgctctctttgacaatgtcagcagctgtttcttcaggaaaatgccgacgaataggttgggcggcaggaaactctttcgccgcttggttttcacgaatgaaggccattaacgcttcagggtccattttccctaccacgaataaggtcatattacttggatgataaaacgtattgtaacatgtatacaaatcttctgcggtaatctccgcaatacttgccactgtgccggcaatatcaatatgcaatggatgcttcggataaagattgcctaaaatcccaaagaacaagcgccagttaggatcatctaaatacatttgaatttcttgtccgatgatgcctttttctttttcgaccgtttccttcgtgaaatacggcgattgcacaaaatcaagcaacgtttctagattttgtgtcacttgatccgtcgttgaaaacaaataactcgttttcgtaaaactggtaaaggcattcgctgaagccccttgttgcccaaatttttggaagacatcgccatcttctttttcaaacattttatgttctaaaaagtgggcgattccgtcaggcacttcaatcatttcctcttgaccaattggcacgaacgtattgtcaatggaaccataatcggtcgtaaacaagccatacgttttttggaaatcatttttcggtaataggtaaacctttaaaccattttccagtgtttctgtatacaatgtttctttaatttgtgcatagtcttttttaatcattttccgtttctccttccaaaaagaagatcgcttgaagttccaagcgtttggctacttcttggatttctggaatagtcacggcattgatccgcgcaatccattcctccgccgtcagcatcgtctgcggcattaattcgttcaagtattctttttccagccacgcgcctgcattatctaacgctaagatatactgattttttaacattgctttcgtttgttcaatttctaattccctaatcttacctaagcgaatattttccaattctgtcgaaatcaaacgcaagacctgattccgatttttgccatcgatccctgtttgaaccgtcatgaagccacggaaggtgtcgatactactagaagcataatacgctaaatgctctttttcacggacattcataaataatttagaatgcgggaaaccgccaaaaatcccattaaacacttgcaacgcaaaataatagctatcgccataataaatatctgtgttgtaagccaagtttaatttcgattgggctaacacctcacgctcggtccgctcttcaatcacgttgcgaattggttgattgtagaaaatcgcggctttgccttcttcacgaggtgtaaacggtaattgcttgaacaatggcactaactccgcctcattgacatcacctaaaacaaaaatatccacttgatcttccgccagcattttttgataatacgctgctaatgacgccgctgtttcctcagctaacgccgcaacagtcccgaaactagggattttttgatcctccgattgattaaaatagacactttgaagcgccaaagaggcataggtttgcttatcctccacaatactttccaagtacgctttcaagttctctttttcccgttggaaggtttccgcctcaaattggcccgcttgaatattgggggcaaaaataatttccttcaaaaagtccaccgcttcggcgagaacctgactatcctgtaaataatgatcattgacaatgttcatagaaatattaaaccaatgttgattgccttttttggaaacgccaatcccaaagctggcgccgtaaagctccgccaaacgctcacttaacttgacttgattcgggtaattcaagctgttggtttccatcaaactggacaacagcgttctttttgtaatagtttcatgatttaatcgtgtgttaaagcggactaaaagacgcaccgttttatatttttctgtaggaatgacgtgtaaattcacgcctttaactaattgaacagacattgccgcatcgctccttcatttgcttcatcttacctaaagaatgctgtgaaatatatgtatcgcgtaaattctaaagcattttttaatgttttttccaatagctccattataacacagcttcaggtgctttctgaatgataagagtttttcagttcaaattttcaagaagattcggtatactgtttttaaagtgaggagggaaaaaagaatgattaaagaatttaaagagtttatcatgcgcgggagtgtcttagacctagccgttggtgttgtcattggtagtgcgtttacagcgattgtgacacaagtggtggaaggcttgattaccccgttaattagtctgatttttgtcttgacgactgggaaaaagagcgccgacgatgcattgggtgcccttgtctataaagtcgaaggcgttgaattcaatattggtagcgtgattagtgcacttattacatttttaattacggccttcgtcctcttcttgattgtcaaagcggccaacaaaatgaaaaaccgcggcaaaaaagaagaagcggcagaagaagaagtggtaccaacgagcgaagattacttaaaagaaattcgcgacttattagcggcgcaaacaccgcctgctgaaactgtcaaaacagacagcactttcacagagaaataagcaaaaagtcatcctaaggggatgacttttttgtttggacttacacagatggtcctgcgacgaggttccacgtgatactgcctgtgtaggcccctgctttaatattgttggctggtgttgtgatgtttaaagctgtattaaacagtgaaaattgccataatccttggccttgaccagctgctgcgttagccattaattgggcttccccgcctaaatcaagggtccaattttgcggagcagccagttgtggtctgacttctggtgtagagactgctgtcgtcagagctacataactattgcttgttgcctcgtattctaaatcaagttgagtaatcagcgccactttaatgttgccttgtaagctttcagtgcctaattttaggccattagattgggccgttaaatgccagccttctttgccgccgcgtacgtcaccgacaccaatcatttctgtatggccgttggtggcttcggggtctctttggttaagaattggtttcgttaaatcatctgaaattgataatttcccaaaattaaattctcgaggaataaacagtaaatcaaagttactgtttgagccactcgggtctggatcaacggtattggcatcgccgttgccatctggcaacgtgccgccttcaaatgctgctgtgactggcgtattccctgtcgtagtcgcctgtgccgaaagcggggctaaacttgcgccaaccactgcgctaccaactaataaacttgccatcattttctttttcatttgtgttcttctcctttacgattgaatgattattagagggcagaccaatagcagttatccgctgatggtccgtcctctgttcttttgttgcttgtgcttaaattgatggtcctgcgactaggttccaagtgatattgcctgtgtaggcacctgctttgatattgtaagctggtgtcgtaatatttaaatatggtctaaatgaaaattgccataatccttgcccttttcctgctgtagcattcgcaagaagcactgcatctccgcctaaagcaattgaaaaagctgttgtatcaacagtttccggtttggtaactgggtcggcaagatcagcactttgataatcatacgttttagtttcctcattataaattaatggatacaaaaacattgctcctgttgtaatactgccttccaaactttcctcgccgagcttcataccagtcgattgagcagtcacatgccagccttctttgctccctcgtatatctcctacaccaacagattccacatttccagcacgtccttcatctgttttattaggaattggtttagttaaatcatcagaaatagataatttcccaaaatcatattctcttggaataaaaagtaaatcaaagttactatttggcttcgtcgggtctggatcgactgtatttggaacgccattaccatctggcaacgtgccgcctgcaaattctgctgtgactggtgtattcccagtggtcaccgcttgtgctgaaagaggtgctaaacttgcgcctaccactgcgctaccaactaataaacttgccatcattttctttttcatttgtgttcttctcctttacgattgaatgatttattagaggacagaatagctgaggttctgccctctgttttcgttgcttgtgcttaaattgatggtcctgcgacgaggttccatgtgatgttgcctgtgtaggcacctgctttgatttgttggtatggagtagtaacttcaagattcatggtacgaatacctgaataccatatgccttgtccttttcctgaacttgctgtcgcaattgcaatagcatcaccgcttaacggaatattcgttcccgaaaaatcaggtgtagttggatcagcttcataattagctaaactctcagcatcagttaaataaacatatatttgttttgttgcatcaaattttgaataatatccgatttgactaaaattaaggtttccagctaaggcttcactcccattagccaaagttgctgaagctgtgacatgccacccttctttcgttcctcttatatctccgattgcatagccaagatattgttgtgtagaactaatattttgtagactatcgctaatttttgtggtgttaaatgtaactgcttttggtatctttactaagtcgaaattagtgttaggtactgtcgggtctggtgctgtgttatctccagcatttcctgtctcgttatctaatgttcctccaccaaactccacctgcactggcgtattccctgtcgttacagcctgtgccgaaagtggtgctaaactagcggcaacgactgcgctaccaactaataaacttgccatcattttctttttcatcataatatgtacgtctcctttaactgttctgaatttccagagcgcgcggttcttttttctgcgcttccgaagctatagccttattatacaagaatctgccctcttcgtaattttaaatatttaacagccattcatgaaaattgatgattcctttaaaaccaagcatttctcttgatttcaagctttaatttcagcactttttgatattcacaaatgttatttaatgattttttcgtcaaattcgttttctcctaaaatcttatacatttaccggcggttcttgcgaaaaaaccgtcaattttcatttaatgacagccgtttttgtatttgttcgtcactaagacttacaatttacggcgacgggcgaattccacaaacttaaatttgtttaagcggtgacgggattccgtatagccaaaacaacgggtatcttccaagttcatgatactacgaaccacgacgacatgattgccttcgacttcaccaatcagctgcttgtccatctctgtgagcggttccacggtaatttctttctgggcataactaatcgccaagccaaggtcgttttccagataatcgaaaatcgaatcttcggcacggtgcttcggcagttctgggacaatctctttaatcaagtaatcaatatctaaaatatcgacttccccttcaatctcccgttgccgaactaagcgccacacaggggccccttccgtccaaccagtcaactgagccaagttgcgctccacaggaatttcttctaaggaaaccacatgagtatgactttcaatatgttgcgtttgttgtaactccttgtaactggtcacccctgaaataggaaaattaaactttttaaagttgagcacaatcgagcctttgccttgttttttctgaatgtagccagcgttaatcagtaaattcaaggctttccgaattgtttcacgggaaacattgtaagtttccactaatttgattttca

SEQ ID NO: 490 - DNA, 569 bp; double-stranded, linear
cgaactttgtgtttttcgccagccatgtcaaaataactgacggtaattttgttatggcgaacgacatacccaggtacatcccgatcgacagataaacagccttccccttcacctaaacatacatcttgcacagaatggctcaaaattttagggttgtacatcaccgtacttaatgaaggcgtttcgttttctgggtcgttactaggaacatggacagcaataattcgtttagaaatatctaattgtggtgcagctaaaccaacgccaccacgtaattgtaattcttcggctttgactggatcttgactattttttaagaaagtcaacatgtcctcacctaattgtcggtcttcctcagtgatagggacaggcacttcttctgccacagcacgaatgtggggattcccttcacgaataatatctttcattgtaatcattcaatggttcctcctttgaaacataaaaaaattcttcttttatttattcatgcgctgraataatcagttgtttaccaccytttagtgkancmcaaaaycmccaaaaaaggggstagawtggtttaaaaaacn

SEQ ID NO: 491 - DNA, 1125 bp; double-stranded, linear
gntttacaacttataatcgtatctggcgtttacccacgtctctgcatcgccattaagtctggaataaatcgcctgcattttgcgaacgaaaaagttgcagtaaaaagagaaattcatcatctttcaaccaattttttggtaatgatcaaatagtaagtttgagattgttgtttcaccagcttctaaatattcacgaattgataacattgttgttgtccacttccccttgcttgtttcacttattgcacttgataaacatcaaaataaatagctttcatataatcaattaaataactaggattcaattcttctcccgttgcatcataaattaattgatttggtttacgtgaagcgccgtactgatgaatatgttgtgttaaccatttacggatatcagaataatcctccgaagctaaaatttcatcaacagataattcttgtttcattgcgtgaaatagttgcgcggcgtacatataacccaaggcataagatgggaaataaccaaagctacctccagaccaatgaacatcttgaagggcaccttctaaatcattttcaggtgatacgcctaagtactcttggtatttttcgttccatacttttggcaaatcagcgacttccaaagaaccattaaacaacattttttcaatttcataacgaataatgatatgcaaaggataggtgagactatcggaatcaatccgtatcaaacttgctttcgtttcttttaaagaagcatagaaatcttcaaaagcaatatcatcaaaagtgccttctgcgcattcttggaaaaacgggtattgtttttgccaaaaagctcggttgctaccaatgataatttcattaaagagcgattgtgattcgtgaatccccatagaggcgccttcgcttagtggtgtaaagtcaaatttaggatcaaaattttgttcatacatcccatgacccgcttcatgaatcacaccaaatgttgccattgagaaattattttcttcccagcgngtagtaatccgcgcatcatttcgatttagagctgtcataaatggatgaactgtatcatcgaatcggncttttgaaaaancatagcctaattgttcaaccacaccaatcacaaaacggnggtggtgg

SEQ ID NO: 492 - DNA, 651 bp; double-stranded, linear
gaaattacaacaacattgtctagtgctgctccaattcctcctaacattaagctggcaagaaaaacagttcgataaggtctagttaaaaattgcatttcttcatagcgcagtccttgatcgtttaataatttcatagtaattgtggtaataaaataagrtagaaaaacactaaatattgttgctaaaaccttccttaaatcaattttttttagtccgtagagagtaccagttgatataataatagcaattattgtatagattgatattagcaatagtaagtttatggatctgtttcgctgatttatccaaagcaagaaaaaaagaaagattatattgaataaaataccaactaaagaaaaaaatcctttttttccagcgatacctaagactaatgaaacaaaactaactactaaaataaaagtatagccatctctttttagagaaataaattcccactttttagtggaattatctaataatatttgattatttttattaaatactggattggtactttcatttccattaaattttacttttacaacaacagttttttttgtattatttactagtttaactgttagtaattgttcgctgkcaattatttttactgattttacaataccmaccnggggangtataaaaggtaac

SEQ ID NO: 493 - DNA, 3501 bp; double-stranded, linear
gatggttcaactaatttctattatttttgcgtttttgattatacacactttatttaaaacaagagaaacaagtaattcttcaagaaaattaagaatgttagtgtacacttttttggggataatttttctattaggcttagtaagtgtcgtattaggaacctatgggctgttgaattcttataacattagtggaaattggcgtataaatatgtcctctattttagttgtgttggctggaattttactagttgtactttcttatgttggtatttcaaaatttaaaatgaattgttaggtgaattaaatgaagaaagttatctctaccattttactagtaatcctttttgtgggatcaggttatgtggtaaacgctgctcctgaaatgaagagtttgactaatttcgaaacgaatgatcaacattatgatttacaagggatagaacattccttttgctaaagtgttaaactttaaaacaagtagaaaagatattacagcaaaaacgatattaaaatttgtatatctaaaaaagacagacaatgaattgaataatgcttctgcatctattaaagattgtattcgctatgccacttctattggggtaaatatggaatagcttgatgcaatgaagaatgaacttgatttcaaccaagtgaagagtgagattgataaggatcatccagtattactatgttataaaccaaacaaaaccgatttaatggaaccttatttattagctgtagcgcatggatacgtatacgttgctccagatggtcaaaatactaaagaaccatttatgagtacaagtatctggatgtcgaactatatatatccttctatcctgactacgttggcgaataaaaataagtaacagttacatatttttcagtgaataatgcgccacaaaaagattatacatttattggtatgattatttttaagtaagaaaggttgtaaggaaattgaaaaaatacattttgtgtttgaacacatttgattgaagaacatcaacgcgactatctctatggtaattaggggcacgtactaagtgcctttttgaatgtagagtcatttattatgcttaagaaaaaaacttacacaaaactctatacagatccgatttcactgtaactgcttttaaagaaaagacgatataaagatagtataaagaaataaacttaagtttcacactatctttaggtctttttttttatgcttacagagtaaagaaaattagttagtttatttaactggttgttttgaaaaggagtgaagtgaaatgacgattattttaggaattattggactcttattaatgatctatcttttctggtttttatttaagggggaagaattatgaatagcttgatttatcaaggattatttttcctattcatattattgttattggcagtgccgttaggctggtacattaaagaaatcatgcagggggaaatccctaaaggagtatccttcttacagccagtagaacgtttattttataaagcgattggacctatcagcaaaaaagaaatgtcagcgaaacgctatgcactgaatgtgctgctgttaagtttcttctcaatcgtacttttgattgctattttaatgacacagcactttttaccgggaggttcctcagtaaaaaatctaacgctgccgttagcgataaatacggccgtcagttatgttacgaataccaactggcaagcatatgtaggtgaaacgactttatcaaatacatcgcaaatgtttggtttgacagctcaaaattttgtttcagcaggtgtgggactttctgttttggtagcattgcttcgaggactttcacaagtcaaaaagaaagctttaggaaatttttggcaagatttaactcgtagtttagtttacattctgttaccgatatcaatcattcttgctgttttattaatttcacaaggaaccgttcagtctttccaatccggagtcgcttatcaaggtttggaagggaaaagtctttggttgcatttaggtccggtagctagtcaggtggcaatcaaacaacttggtacaaatggcggtggtttctttggtgctaactcagcatacccattcgaaaacccaacactattctcaaactttttagagaatattgcgatcttgttgctcccagcggcattgatctttgcttttggcttttgggtcaaggattggagacaaggacgaacgataatgatagtatccttgtttttcttactattagctttcgtcggcgttgcttttagcgagtattacgggcctgaatttacgcatgttcttggatctaccaatttggaaggaaaagaaattcgcttcggcattggctggtctagcttatggtccgtcggtacgaccgccgcttcgaatggttcggtgaacgcggtgttggatagttttacaccgcttggtggcgccattccaatgttcttaatgcagcttggcgagataatttttggtggtgttgggagcggactgtatggaatgttggcatttctattgctagcagtttttatagcaggtcttttagttgggcggacacctgaatatttaggtaaaaaaatcgaagcttttgatatcaaaatggctagcctagttatcttaacaccattgatgttgacgcttttcggggcaatggctctagtcctacatccagaggtaatgtcttggttaacgaaccagggtccccatgctttcactgaattgctttatggggcaacttcattagccaacaacaacggaagtgcttttggtgggttgctagctaatacgacattcttaaaccttttagctagtttaatgatggctgtttcaagatacttgccgatcatcgccatcttacttttagcggaaaatatgggaagtaaaaagaaagcagctttaagttcaggaacattatccacggttagtccaacatttgtttctatgttgattattgttattttggtaattggagctttaagtttcttaccatcattggcactaggtccgattgcggaattctttacgatgaaatagatggagtgagtaaaaatgaaaaaaatctatcaatgggcagtgggacaatcctttaaaaaattggatccacgccaacaagttaaaaatcccgtgatgtttgtcgtttatttaggtgcgctcatcactacaatattatgcttctacccaatgggtataccgttatggtttaacatttcaataaccatttttctttggttgactttgctttttgcgaattttgctgaagctgttgcagaaggacgaggaaaagcacaggccgatagtttgaaacaagcaaaaaaggaagtcatgacttataaaattaacagtttagaagatatcaaagaagagaatttcattgaattacagtcttctgatttaaagcgaaacgatttggtctatgtacgtgcaggagagcaaatcccagctgatggtgatgtaatcgarggggctgcatcagtagatgaaagtgccattactggcgaatccag

SEQ ID NO: 494 - DNA, 1856 bp; double-stranded, linear
attcatcaacgacagcgttgacaatcgctcctaaaataataatcgtggcagcaaaattcaaccataacatcaagatgataaaactcccgatgatttgataacttgcgattctagaactaaaatattttacgtacaaaccaaaaatttgtgataatagcatccaaccgactgtcgaaaaaatagcccctggcaaaatagaacgtaacgataatttccgattaggaacgaccgcataaatcaaacacataatcactaataaaacaacggtcgttaacggccattttaacgcttggaaagtatcgatcacagatgttgagtaatggaaaattggttgcagtaattcaataatgtactgacccagacctaaaattactactacaccaacaatcgctaccataaataacaaaataactaaaaatgagaccactcttacgagaataaaatttttcctttgttcgacaccaaaagctttattcatcgcattttgtagtgcattaatactttgactggcactccaaaatgctgctaaagcggaaacagaaagcaacccgcctgaacgttgagtcagtagtgaacgaatcgctggttctaagttcttataaacatctttcggaatcgcctctgcaatataaggcaacacagaattagggtcgattcttaaataaggtaagacattacctaccgcaatcagtaatggaaacagcgagagtaataaataataggcaacaaccactgagctgttgcctatttcggctgtgaccatgtgactttgcgttgtctcaataaaacgcatcaaagattgattctttttgatgttgtcgagaaacttcatcacacactctccttattaataagtcaattcttcgccttgtgacgttaagattcttggaccttctttcgtaatcgctaatgaatgttcatattgacaacttagaccgccatcttcagtataagcagtccaaccatttgggtccattttcatgcgccaagttcctgtgttaaccattggctcaatggtaataaccattccctcttttaaacgtagtcctttacctgcttcaccatagtgaggaatcattggactttcatggatagttgggccaatgccatgacctacaaagtcgcgaactaccccgtagccttctccttctacatacgtttgaattgcatgaccaatgtcgccaattctatttcctacttgtgcttgttcaatcccaagatatagcgcttttttggttacttccatcaagcgatcaatttcaggtgttgattcacccacgacataagaccagcatgaatcagaaattgcgccctttaagtcgacacacatatctactttgattaggtcgccatcttttaatacttttttacgaggaaatccgtggcaaatttcgtcgttgatactacaacaggtagcatatttgtaaccttcatagccaatttgagccgccacgccaccatgactttcaataaagtctctcacaaatacttcaatatcccagcttgtaatgccaggtttaataaacgtccgtaaatgacggtgaacatccgctaataattcccctgattcatccatcatttcaatttctcgtggtgattttaatgtaatcatactatctctcctaaacttgtttcattcaaattattttatcacattttttgcaaaaaagattgttcaaacaccaattttcaaaaagtcccttaataaaagcactcgctagtcttttataagaaatgcgcatctgctataataagtgacagaattgtatgagggggaagaaagtttatgacgttagctaaaattgtgtatgcaagcatgactgggaatacagaagaaattgccgacattgttgcag

SEQ ID NO: 495 - DNA, 6645 bp; double-stranded, linear
atatggttaaggaatttggaaatcgtgtagtaatgccttttgtagatcaagtaaatgtttacttatctgatattgcaacagatatgggatatgatgaggagagaaaatatatgatacatgtaagtggtggacaagctcaggtaaatatttccaacgataacagcaccataaatgctaaccaaaatgttcaaatcaatcaatctaaagttgatgatttaatttctgatttgaaaagtaatattgaaaaggaattagtggataatgaacctattaaagatgttttgttatctcaattggctctgattgagtcacaacagactgagagtgaacctcaaaaaaatgttttgaagacggcatttgagacaatgcaatctttacttaagactgccccattagcagtaactgctgttgaaagttgtaatagattgtatgaactgatgtcacctttatttaattaggagcaaaaattaaaatagttttagaagccaagagcaaaaaatgttcttggctttttactttgcaatgaatgaggttatttatgacatttttagatttatttgccgggattggtggtttcgtttaggtatggaacaagccggccaccactgtatcggcttttgtgaaattgatgattttgccagacggagttataaggcaatttatgatacaagtgaggaggtggaaatgtatgacatcacaagtgtatcagatgagtttattcaatccctcggaccagtggatatcctttgcggcggatttccgtgccaagctttttcaattgcgggaaaacggcaaggattttccgatactcgaggtactttattctttgaaatcgctcggttcgccgctcttctccaacctaagtttttattccttgagaacgtccggggattactcaatcacgaaggaggggctacgttcgagacaatcctccgaacgttggatggattggggtatgatgtggaatggcaagtgcttaactcaaaggcctacgttccccaaagccgcgagcgggttttccttatcggacattctcgagacatatgtaccgaacaagtatttcctatcattgaatcgtctgcaacatctgatcaaaacctcagaaacttgttaaataccaatccttccaaccgaggaatgagtgaacaagtctatggttcagatgagtttgccccaaccgtaacaggcgatgaaggaattaaaatcgcactaccagtaaatgatggaatttctgtagtgggtatgttgccgggaaattttgaacaaggtaatcggatttacgaggtaactggaacagctcccaccttgtcaacgaagcaagggggaacgaagattatgattcgaaaaaataaaatagaatatcaagaggttaagccagagggcagtgtgaatctggcttttcctcattccaaaagtcgccgaggtcgtcttgaaaagcaaagcgtccatacgttactaacaggagatcaacaagcagtcattacagaccagtatcaaattcggaagcttacaccaagagaatgttggcgtcttcagggttttcccgattggacttttgatcgagcctctcaagtcaattcagatagtcagttgtataagcaggccggaaactctgtaacagttccggtcatttttgatattgccaagagattaaaggaggtgaaaacggatgatttatgatgaattgattggagaaatctaatgggtgattggcaagattcactcagatccggaactgaaagaagaattacgtcagcttaattttgatattcgcaaaaatgttgtgaaagtcactggtgattcgtatgtaatggacgagggaacagatactcgaattgagctgaatcaagtcatcaaagaattagaacggattgcgtaccttgcgaaagaatcggatatccgtcaatacttgtttgagataaaagcagaactggaagtaggtggcattactgaagggtagcagccgaataaactaactgatgggcgccgaccgcgggggatttgcgaagcagaaatcctctgtggtgctgtgcctgttcatggacggcgtcagccggccatgatgtctcacccccccgtatctaacaggggggtacaaaaacacaaaaaatgagcaagtaatcattaagaattattggtgtagcaaggatattaagtaatttgcataggtgttaactcattaaaaaaagttaacaccttgaatttggaggtgagaacttggcacaacggaatttagattatcgattattaaaagaccgacgtaatgaatatggtgtttcacaaaataaattagctatcgcttgtgggcttagtcggacctatttaaatctgatagaaaacggtggcgtaactgcctctacaaaaaccatgagaaaaatttttgaccaactggaaagttttaatcccgatttacctttaacgttactgtttgactatgtaaggattcgtttttccacaacggatgtgcggaagattattcaagagcttctccatctgaaatttgagtatatgcttcatgaagattacgccttttactcctatcaggaacaatatgtcatgggagatattgtagtgatgttgtctcatgaagaagataaaggtgttcttttggaattaaagggtcgtggttgccggcagtttgaaacttttttactcgctcaaaagcgtagctggtacgactttttcgaagattgtctaaaaaccggtggtgtgatgaaacgcttggacttggcaatcaatgatcgagtggggctactggatatttctgatttaacgaaaaaatgtcagaaggaagaatgtatctccttgtttcgtacctttaaaagttatcgttccggggaacttttaaaagctgatgaaaaggatggcatgggaaataccttatatatcggcagtctcaagagtgaggtttatttctgcttgtacgaaaaagattatgagcaatatatcaagttagggattccattagaccagactgagacgaaaaatcgttttgagattcgactgaaaaatgaccgtgcttatcatgcgattcaagatttgttaaaaggtcgtagcattgagagcaccacgttttctattatcaatcgttacttgcgatttgcggataaggtggaaggcaaacggcgaaccaactggcccttgaatgaacaatggggtcgctttattggacggaatcggaaggaaattcaattaacttctgaaccgaaaccttataccattgaacgaaccttgaattggcttggacgtcaagtcgcccctacgtggaagatggcaaaggaattggatcggctgaatcagacaacgtatatacaggatatggtacggaatgcacggttatcagaccagcataaaaaaattttggaacaacaaagtatggcaatcgaaaatttgattgtatgaaaagaggaattttgatgggaattgtaaaagatattttattggtatttggtggcagtatgcttggtgttactgtgatgtgcttgatgcatgcaagtacagcagcagaccgagtaatggaaaagaaaggaaagtgacgagatgaattttggacaaaatttatatcaatggtttttgaccaatgctcaatccttagtcttactagcgattgtagtcattggtttatttttaggatttaagcgggagttttctaaattaattggctttttggtgattgccttgattgcggtaggtttggtctttaatgcttctggtgtgaaggatgtcttactcaatttatttaaccgaattgttggtgcataagggggaatcacgatggagcagatgcgtgtttatattgcgaaccttggaaaatacaatgaaggagagttggtgggggcgtggtttactccacctgtcgattttgatgaagtcaaagaacgaattgggttaaatgatgattatgaagaatatgcgattcatgattatgaactaccctttgagattgatgagtatacatcaattgaggaaattaatcgattgtgtggcttagcggaggaattagaaggaacgccaattggtgaggttgcttcagagattcagcacgctttctttaattctttcgaggaaatggtggagcatgtggatgatattgtgtattatccagattgtaatgatatggaagatttagcttatcaaatggtaaatgaggggtatttaggagatgctccagaaaattttgtaaggtatttcaattattcctcttttgctcgcgacttggagattgagggaaactatttagttactaatcgaggtatttttgaatatccaatctaaatataagccattcaacttgaatggcttatatctcaatttattagtggaagtttatcagtgttagaaagcgcccaaacaattgcattacctgctaaagtaacaattttaggatgtttttcgagaaaatcagaaaatctttctaaaacgttaggtttaaaatctttagtttctacgatattgataagctctttgccaacttgttgctcttcaggtggtaaagcatcaatatattcttttaattcatcaagagaattattccaattgtttgtaacggtattattgtttccgaatgtcgctcctctatagtcacctgaagagttaaaattaaaggtatttgtcgtctgaatcgattgactatttttttctgaaggatgaattttctctgccccctcttctgttagttcgacatcatctgacgaaaagacgaatagacgtagaggaaaatgccgagaaaaacaggggaaatgcccgattatctgtcaaaactccgacaaaaaatgcagaaaagatggcctacctctggcacacaccacaaaaaaacagaatatcgaaaccacaagccgtgcagtaactgacaaacaatcagctactgcacggctttttttgttatagatcgctttgccccgacgacacagatcgccggggcttttttcatttagacaggaggctttgaaaatgccggaaacattgaatctgaattactactacgggaatgaagccgaccagtacagcttttaccgtatccccaaaaccctgctgaccgaccgccgctataagggcgtgtcactggaagcaaaggtactgtatggcttactgcttgaccgcatggggctgtcggcccggaacggctggctggacaataatgggcgggtattcctctacttcacgcaggaggaagccatgaccatgctgggctgcggcaaagacaaggtgacaaaactgttccgcgaattagaggggattggcctgatggaacggaaaaaacaggggcagggacatcccgcccggatatacgttaaaaattttatcttggaaccggaacccaccgcgccggttcagactgcggaaaatcagcagtcaagaccgcttcccagtgccgccgtcaagactgctgaaaaaccgcagtctgcaccacggaaaaccagcggtcaagagtgcggaatttccgcccctaataatactgatataaataaaactgaaaaaagcgatactgatctatccatcctaccccctaccccctcggcagtttcttctcctgctggtaaanrcgctccgcgcaggatgggattggatgagatggaaagctaccgtgagctgatcatggagaatattgactacgacattctcttagaacgttatccctacgaaaaggacttgctggacggctatgtggagttaatgctggaggtctgctgctccacacgggaatctgtccgtatctgcgggcaggaagtacccaccgaagttatcaaaagccggttcctgaagctgaacagcgaacatatcggctatgtcatggacagcctgaaaagcaatactgccaaaatcggcaacatcaaggcatatacgctggcggcactttacaatgcccctgtcacgatggggcaatattacacatcccttgtcagccacgatatggcgcatgggctgctgagtggttaaaccacccagggctttgcgatacatcaatcaaaccaaaggaggacatttgcatggaacatgaaatcaacattctggtggtggaaccgggcagaccgcccaggccggcacgggtggactactcgctggaaactttttcacagcttgtcggcggggatctggcaatgggctgtttccttccccagcgggtcatgctgctttataacgaggaggccaaccgccagggactgccgcccaaccgctgcaatccctttgtgaacgagtgcatcagcggtacattcctgctgtgcgggctttcagatggggagggcttctgctccctttctcctgcccagcaagccgagtttcagcgccttttcgccagccccggcgagtttatgatgctgggggcaaaccacatctgcacttcgcctgccgagtttgccgaaactgtcagcaggctttggggcggtatggcaagcggtgagtctgtggtgctgaccaagtggggcggcacggaaagcggggcctgaacatgacaaaacaaaatagcaataccgaccgccgcagtttgcaggactgcggcgttttttcatcggcagaataccattcagtcgggttaagcggcggcaaggattcctcggcgctactgctcctgatgctagaaaaagggatgccgattgacagcgtgatatttgccgataccggcatggatttcccggaaatggcggc

SEQ ID NO: 496 - DNA, 1075 bp; double-stranded, linear
ggaacacaagtnagtacacaagatactgttgaggttgatggtgtaccaatttatcaagaagaatatggttattatttattctataaaccaagaggggttatttctgcggtgtctgacgataaaggccgtaaagtagtaacggattattttacagatgttactgagcgaatttatccagtcggtcgtctggattatgatacttctgggttgttacttttaacgaatgatggaagtttttcacaaaaattaacccatcctaaacatgaagtagataaagtctacgtagcaaaaattaaaggtgttccaactaaacgggatctattgccattagccaaaggcattcgcattgatggcaaacgcacagcaccagccaattttcaaattctttcagcggacattaaaacaggtagcagtgtcgtggaattaacgattcatgaaggacgtaatcatcaagtgaagaaaatgtttcaagctgttggtttccctgttcaaaaattaaaacgtgaacgttacggtgagttgaccttacaaggtttgcgaccagggcaatatcgtgatttaactaaaaaagaaatcagtcaattattaaatcaagctaaataagataaaacgactcgatctcttcgcgcttatggcgaagggattgttttttttgagaaacgaagcaatcaatgaaatttaataaaaaagcttagttagttgcattcattgttcaaatcggttacactaagtaagtaaaaaaatataatacaaggttcgtcttcaggggcagggtgtaattcccgaccggtggttatagtccacgactcgtttttaacgattgaattggtgtaattccaataccgacagtatagtctggataaagaagatagggcttatttgagacgctttttcatcagataatcctactctatttttccctgcagaaaaatagggtttttttgtatgacaaagaagcgaatcaaaaagttcgttgaagatgggtccttaattggaggatttcagatgaacaacaaggtacaaaaaatggtcagcattgcaatgttggccgcaatnggtacagtattacaatttg

SEQ ID NO: 497 - DNA, 1689 bp; double-stranded, linear
taccacatcccaccactttctaccactataaatctaaaaacttctattttttaactgttatttaaaatttctgtaatatttanagggttttatgtaacaagcatcacccaacaaaaaatgttattataacaaggtttttactatgttttttataaaataaccccacaaataacaaaaaaaccccacggaggaagttgtgggggacattttcccacagcgtatttcccctattgtctccacgctttattacagtagataatgactgatatttagcaagataagcaacacatacaacacaaacgttagtaaaaacgtcaaccgccaaaacatcttgaaatatcgtctatataaaatctctccataataataagcttgaaacagggcaacagcgactcctaataacaaaatagaaatcacaaaatacggcataatcgattcatcataactatctttggataactcatggatccctatgaataaaaacggaatggccaaatccggtgcttttattttccaacgttccgttagggaaaaagtggacacgagaaaattgcacgcaaagagcacaattaccggaaaaatataccaaaataacattattgccgaaaacgacaccattctctcaacaaatcctttcattccacctgctataactatacttcatcaacgttacacagatgtttcatttcgtttaaatatatgtgctaaaagccctttttgcttgctttttcatataaaaaacggattacttatcaaaccattttcaaaacgaggcctcacctatcgcggccacttatttttgaatgttttttataagcttttcttctcgtattgtgtcatacttctattataatggatttagaacaaaaaatgttgattcggggtgaatcttttgattaattatttattattgaaaaatgactattttgaaccttgttcaccagacgatgaagccctaagttggatttcggtagaatctcctacagaagaagaaatcgagcgtctcgtcaatcaataccacttaccaacagattatcttaccggcgttttagatgatgaagaaaatgctcgagtggaaggcttccgccacgaaaaattacaaacgcctacgttacttttatttcgttatcccaaagctagtatcagtcctagtggctatctgcaagtagaaacggtgccgattgctttaatcgcaaccatcgataacaaactaattactgttagcaacgggcctaacgacatcgttcatgggattcaaaaagaggcgttcacccatcaagatctttctattgagaaggccttaattttagccctttcatggaagatggccctttccttcaataaaaacttacaagcacttatccaacaaaccaacaaacttgaaggagagctccaagtagccacagaaaatagtcaattgtatcagattatggacattcaaaaaagtctagtttatttcgaagcagctttaacggataatttaaaagtattaaaacgtttatatagcgctgaaatttttaatcatccagaaaaacatttgccatttttaagggatattctgattgaactagamcaaggactgaatacgactaaaatacaactaaaattagttgatacattagtaatcctttttcagcaaccgttccaatacttaaataatgcatgaaatttacancttacaatggcctg

SEQ ID NO: 498 - DNA, 1360 bp; double-stranded, linear
atatnatttgattannagttcatcaaattaccctgcattacaacaatctatatcaggtatttactcaatttcaaataaattattttttggctcattaatatttgcaggagttgtagtttcattattattattcttatggatgaatgctagaaagaaagaaatagcagtattactatcattaggtatatcaaaattagaaatttttggtcaattcctaattgagatggtatttatatcaatccccgcattcgttggttcctatttcttagctcaatatacagctgacaagcttgggaataatatattgaataaggttactggtgatatagctaaacaaatagctaaacaatctgcatctagccaattaggtggtggggcagaagctgaaggatttaacaagacattatcaagtttagatatcaatgtattacctaaattcatgatttatgtagttatatttatgagtttagtacttcttgtatcattgattatttcttcattcaatatattaagaaggaatccaraagaattattaattgacaataattaaaattttcggtgctttttagcaccaaaaatgagagtgtagtataaaggctctttgtcaaatgatgttggtaaagagaaatcttagaataatttggacagaacagaragaagaaaccctcttcctgttctgkttatytggttaaaaatgttttgccatgacgaatcatgatccgtagtttgaaattgtamaagctgcgaaagccgtacgcattgcgttttaatactttgatgtggttgtttaaacattccaatggtccatttgaatagctgtagtgaagcgcattttggatctgtggcagaaactttttaaacgttcgtaaagtggttgtataggtttcaggaagaccgctgacttctctgtttaaacagtcctcaaataatgactgatctcttttctttaccgcataaagaatgtcttggtataactgatagccttggcgcaggttgggacaagcagataacagtcgatcgacaatctcactttcagtcaaataatctttaaaactggcacgccaaacccttttttcgtagtttaactttgcttcttctttttgtaggagtttccaatagcgtttcaattttttccctaaccctcgttgagagtgggaagttcctttaagccgtgccgtggtttctttcactcgatgattcaagaaggttctgccaatatgttggacgatgtggaaacggtcgatgatcaactgagcattcgggaaaagctttttcaccaatgaaacataaggcgcatacatatcaataacaatccattgaacggcttcacgagtcgctaatgaaaaccgagaaaatagcg

SEQ ID NO: 499 - DNA, 1656 bp; double-stranded, linear
ttttttatcggnctcgccatgcccgtttccaacttggacgggaagnttgaagcttactgcgaaaaggaagttggctgcttncaggaaaagttggaattcgcaaccactttaaaccaatgagggaattacmagktgragcttcttcmatgnatawtaargtctctgagttaaaagaraaaatggcggataatgaagaattattggctcaaatttcgacagacaaacagaaagagcaacaacgcttagtcagcgaaaaagcagcagctgaggcacagaaaaaacgtgcggcagaaactgccaaagcagaagcagcgaagaaacaagcagctgccgacaaacaagcgcaagcagatgcggcggctaaactagaagccgaagctgctgaagagtcaagcagtcaagcatcaagctcttctacaagtatggaaagcagtagcactgaatcttcaagttcagctagttcatccgaatcgtcatcaacgccagaatcatcgacaggcgaatcatcaacaccaggaactggytctggtcgtgtgcttcagatggaatcaactgcttattcttggcgcgaagctggtgcaagtaatctaagtgctactggtattgacttaagtaaagaaagcaatgtagttgcagtcgatccaagtgtaattcctctaggttcattagtgaaagtctctggttatggctttgctattgctggggatacaggtggcgctattcaaggcaatattattgatgttcattttgattcagtagaccaatgccgtctttggggacgacgtcaggttacagtagaaattcaataataaatttgttatactaaagataagataaagggaattggctaagtcagtaatgatagtagccagttcttttttagttaaatgtaaaggagaattacaatgattcgctcagcaacaaaagaagacggtcaagcgattgctcggctggtcttagttattttaaaagatatggagttaccaattttagaagaagtctcagaagaacaaatgattgacctgttagcagaggcaacggcgtatccaacctatcgctatggctatcaacgaattttagtttatgaacatgcaggtgaagttgcagggattgctgtcggctatcctgcagaagatgaaaagattattgatgaacctttaagagaagtctttaaaaaacatggcttagcagaagatgttcggctatttattgaagaagaaaccttgcctaatgaatggtatttagacacgatctctgtggatgaacgtttccgtggaatgggaattggttctaagttattagatgctttacctgaagtagccaaagctagcgggaagcaagccttgggtctaaatgttgattttgacaatccaggggcgagaaagttatacgcaagcaaaggctttaaagatgtcacaacaatgactattagtggtcacttgtacaatcatatgcaaaaagaagtgtaaaaataacgaagctaaagtcaatcactttagcttcgttatttttcattaatccgttaaaggatcaaaatctaatccaaaatcatcggaagttttttgttttttcttattatataaccagtagtcaaggacagctgctatgcagatgcacaacggtgcgtcctcatcattggcaacagttaaaacaaaa

SEQ ID NO: 500 - DNA, 3522 bp; double-stranded, linear
ttacttggactgcttctgcttcagtactttctttcattttttcagttcgttgatctggttggcaccccattaaaacaatcattgaacaaaataacccgacaactatctttttagttttcattttccctccttttaaaactcattgaattaccatttaattttaatataagtagaatgaaaagtatagctaagcaatcgttttttcttcatacggcgataaacttaactgtccagataaatactcacctaaatagatttcctgtaatctttgaaatccttgttcttggatttgcgttaatagccagtgctcatcttttttgattaactctaggacatccatgttggcttgaccgtccacaataatcggataacgaatactttcatcgccatattcgacgattgttaattgaccattttgttctaaaaccgcccgtttaacaagctggacttcataaataccatttgctcgtaatttaaacattagatcatttgcagaaataccatttttcaaacattccttcaccacaacctgtccatccttgattaaagtaatgggtttaccatccacaatttgcttcacatagcgattgtgttcttttgcaaattttaaaattaagactaataatgtccacaaaattaacactaatacaaattggagcaccgtaattgaatcattataaataacaccaccaataatgccccccaatacatagttttgcacttggtccatagccgatgtgggcgccaaattcccttttcccatcaaattaatttggacaattaaacaaataatacctaaagcaaatttaataataattggactataaaactgcattaattttccctcactttactttatgatttcaatcgttggtgttaataaatacgtttcttgtaacgtataagactgctgatccgtacttaaactcattttgtaaaacacttcgtcaattttaactatggttccgtcagccaattgtgtaccattgacataaactttttctggagaaacttttttttcctgtgccacttgttcgacaaaatgtaccatttgtgaagattgtgaatgctgattttggttcagttgataattggaatattgaacccctaaaacaaataataatgataaaaaaataataatacttaattcacgatatttcgtttgaatttgatgtcgcacataaaaactaracacaatgactagcccgattaacaaagcaaaaataaaaaaatactttaagtaatcatttaaattagattggctttttaaatactcgatgccataaaaattcatgttcttgtccactccttgataggttcgttatagtaagtattctatctcaaaaaaaacaatcacccctactttaataccttatracaagaaaaagctcagcgcaatcatcttgagaatgactgcgccgagcttcaatcttctaaagattcagctactgattgattacaaattaattttacatcaaacttttcagttcaacatctggatatttatccgcaaaccagcgttccgcaaattggttttcaaataagaacaaaggttgatcgaaacggtcccgtgccaaaatgtttcggctagagctcatgcgttcatctaaatcttctggattaatccagcgggcaattttagaacccattggcgtcattaccacttcagcattgtattcattagacattcggtattggaaaacttcaaactgcaattgacctacggcgccaatgatatattcttccgttaaatatgttttgtataattgaatggctccttcttgaaccagttggtaaattcctttatggaaagatttttgtttcattacgtttttggcagtcactttcatgaataattcaggggtaaatgacggcaactcttcgtattgaacattcattttcccttcatacaaagtatcgccaatttggtaatttcctgtgtcatacacgccgataatatcgcctgcaacagcttctgtgacgttttcgcgggcatccgccataaattgcgtcacgttacttaatttgacttttttgcctgttctacctaaggtcacgtccatgcctctttcaaaaacacctgaacaaattcgaacaaaagcaattcgatcacgatgggcggggttcatattcgcttgaattttaaagacaaagcctgaaaattctttttcataaggacttacttcgccaccctcttctgttttatgcgcatgtggcgcaggcgcaaattgtaagaaggtttctaaaaatgtttgaaccccaaagtttgtcaaagcagaaccgaagaagactggcgtttgatcaccacgagcgattttttcctcgctaaattcatcgcctgcttctaccaataactcaacatcttccaacacttgttgataaacgctgttattgtgcaatggtaaatcgcttggtatatcgccatcttttaamggaataaaacgctccccgccattattttctggacgatataattccacgcgttcattataaatatcgtatagaccttctaggccttttcccataccaattggccagttcattggataagattcaatatccaatagttcttccaattcttctaaaagttccaatggttcccgtccgtcacggtccaatttgttaataaaagtaaaaattggaataccacgttttttaacaacttggaaaagttttttcgtttgtgcttcaatccctttggcactgtcaataaccatcacagcactatccacggccattaaggtccgatacgtatcctctgagaaatcctcatgccctggggtgtccaagatattaatccgtttgtcttgatagtcaaattgcatcacagaactcgttaccgaaattccccgttgtttttcaatttccatccagtcagatttggcaaagttccctgtttttttccctttgactgttccagcttggcggatggcgcccccaaataataataattgttcagtaatcgttgttttcccggcatccggatgggaaataatcgcaaacgtacggcgactatcgactgcttctttttgattgatcgtcataaaaatctccttatcacttngtgatgtyatytatttatttycttcagctaattttgattaacctttgctagtatatcatgtcaagccttgagaataaagagctgctgttggctgttttttaaaaggaaaacctgcgacattagtcaaaacgactgatgtcacaggttatttttaacgtcttggttcgtcatcttccatttctttacggaaaaaacgacgattttcttctggttcttcatcgacagtttcttcatcgtagaaatgaacgcgtaagactagcaaacgtgtgccttccatttcttcagcagttaacttaatattgcccacttcaaaagaaggtttttccccttcatcaggaatggttcctaatgctgtaattaagtaacccgccattgtatcaacatcgctcatgtgtaaatctgtttcaaatacttcattaaattcgtcaattaacatgcgtccttgaaccanntattca

SEQ ID NO: 501 - DNA, 1693 bp; double-stranded, linear
ttgtactagnagataacttcctgatctagtgcctttttcagaagcaatctcttgggcaataattgaagaataactgctgatgaagacaaataacaaaattgttatccccattgctaacgccatttgaatccctgtgttatcttctcctgtttttattttgccattttcatcaaaactaattttggcttttttaaatgttgcttgttgattcaacatggcaacttgctcagctgttaggtttaaacgattggcattcgccattgtttgtaattggtttaacatttgaggaattagcatctcggttgcatttcctaaagagcgttcagagtaaagctgaccagaaatctgattatctgtagtgtccaaaagtaaataggcatcaattttctcgtcttttaattgttcttgggcctttttctcagaagaaacagctttgaaagaaaagtcctctgttttattctttgtcaactctttaacgagcgcttgattttccgaaaccagaccaatggtagtatctcctgaaaaaccgctagctagagagcccgctaagtaaacaattcctacaagaagaaatggcgctaaaatcatgattaagaaagacagcgacttcacatttttcttatagacatcagtcgcaataatccaaaatttactcatcttgcccacctactttcattttgaaaatttcttccaatgttggtggttgttgattaaacattggaatgtagccgttggctgtcgctttatcaaacaacactttgcccacttcagcgttttctaatgtcgcttctaagacgccatcttgtcgcaagtgtgcttctttcacamctgctgtagcagcaacttcctcaacagataacggtgattctaagaataattttgttcgaccaaattgttgtcgaatttcatgaacctgaccatctaaaaccatgcgtccattttttaacatgactaaatggtcacagattttctccacattgtccatattatgactggaaaaaatgacacaagaaccttgatttttcaattcaataatgccgtcttttaataattctgcattaactggatccaagccactgaatggttcgtctaaaataattaacttcggttcatgaataagtgtcgcaatcaattgaactttttgttgattgccttttgataaagatttaactttatctgtttttttgcctttaacttgaaatttttccatccaaaagtcaattttaggttcaatttcttttttagtttttccccgcaacgaagcgaaataaattagttggtcttcaatcgtaattttaggatataaaccccgttcttctggtaaataaccaataatattgtactctttttcatttaatggttgaccattccataaaaccgacccgctatcttgtgttaaaaaatttaaaatcaagcgaaatgtagttgttttcccggcaccattttggccaattaatcctaaaattttcccgtccggtatcgtaaaggatacatgatcaactgctttaaaatccccaaaggttttgactaactcttttacctctaacacataaacgcccccttcactttttctaaaccgctgtttagttacycatatcgtatctttcctgtgttgggcttgtcaatgacaattgtnatggaaagatgttgcactttaatcagacgcttnattttccgccnaacgaaaaaggcc

SEQ ID NO: 502 - DNA, 1495 bp; double-stranded, linear
naaanctcggtggtgaaaaaatgacagacaaaaagacaaccgaaaaaanaganacagaaactgctgcaacctttacagaagaactaacagcagttcttgaagaaataaaagaagaacctgtaaaagaaaagaaaaaaggggaaattgtcaccattgtgaatgaaacagatattcaaattggtgaaagagagtaccgaattgttaaaaatcatcgtgatgcctttgatcctgaacgcttaggtgaacggtttagtgaagtattagctcgttatgattatatcgtaggagactggggctatgaacagttacgcttgcgtggcttttttgatacttctaatcgtcgggcagcgccggatcaacgcattgatacactagaagactatttgtatgaatattgtaattttggctgtgcctattttgtaattgaacgaacaggggaacgtaaagaaaaaacaacgcatcgtcgtcgtcgccataaaaaaaataatcgttctaacgcgtttgtcgaggaaaagagtgcgcccgctaataaaaatagcaagccagtgattcgtacgagaaaagaagaaaataaaaaaacgactacacccaaacagcctagtcccaaaaaatctggcaaaggctttacgattcgtcaacgtgaggagtaaacagagtgaaaaaagactatcaaggatatttaattgatttagatggaacgatttatttaggaaaagaaccaattccagccggaaaacgttttgtcgagcggttacaggaaaaagatttgccttttttatttgtaacgaataataccactaaatctcctgaaacagtggcacaacgtttagcaaatgaatttgatattcatgtcccagcatcccttgtttatacagcgactttagcgacgattgattacatgaaagaagccaatcggggcaagaaagtctttgtcatcggcgaggctggtttaattgacttaattttagaagcaggttttgaatgggatgaaacaaatcctgattatgttgtcgtgggacttgatacagaattatcttacgaaaaagtggttttagctaccttagccattcaaaaaggggcgttgtttattgggaccaatccagataagaacattccgacagaaagaggcttattacctggtgcaggttcagttgtgacgtttgtggagacagctactcaaacaaaaccagtttatattggcaaaccaaaagcgattatcatggaacgagccattgcgcatttaggcgtggaaaaagagcaagtgattatggttggagataattatgaaaccgatattcaatcagggattcaaaatggtattgatagcttgttagttacatcaggttttacccctaagtcagctgttccaactttgccaacgccaccaacctatgttgttgattccttagatgaatggactttttgagtatgatgaggtcgaaattgcgtttaagggaaacacttggactcatttgtttgtttttaacgattgtgg

SEQ ID NO: 503 - DNA, 648 bp; double-stranded, linear
gaggagtggaaatgagcattgcattaccaaaacaaaaacatttaagaggtccgttacttgattacctgagaattgcagaggataatggcgatttgtttgcatggagaaaggcgtgcgaaattgggcgagaaatattctcaggtgatttttcagacaatgctaaaccattaattgttatatacaaagatggatcttcagaagtatttaacacaagagctgatgtaatttcagcgtgtcgaatcggaaatgaaactttgcgaaaatgtttggagactggcaaacaagatagattgggtcgctgttatgactatgccattttagagtagcaaattgtaatagctaatcgtatcttttggctcaagaggttagtcattatgaattttaaaattatgagtttggagggggagcaatgggaaaaaatttactcagagagaagaagcgattgatacgacaaaaaattctttttctgacgggtgaaaacgaatcttgggatgaagaatccagaaatcgtgaaagaagtccagaggctctctaagcaactagagtcagatcttatagcagataagcgaccattgcccagtttagatcctgataaattaacaaaagagaagtatcaacatttcttagatttaggttatcaagtaggag

SEQ ID NO: 504 - DNA, 1243 bp; double-stranded, linear
cactgttttcggatctactttggcaagttctgtcgtatcccctgtcacaatgtattgtaaagaatcgcctcgtttcacatttaaatcattgatatttttctgrccatcagtgacttctttattcggmacaagaacaggaaccacattggctttgtatcgattgaattcaatcgttgctttttctggttgctttggacgtcctttttcttgataaggcgtaattgattttgcttttaaatccgtattaaatgcgaaccacatcgaatttccgtcataccctggattgttaacaatttcattcccgaaagtgaatttaattctatttggtgttgaaataacagttgcgccaatatattctttgccttgaactgcttcccagtcacttattgaaatcccattcgtccctacatcaatatccgttttagaataaactttatttccatgacgagctacttttgatccattaatttcatgaacagtatccgtgtttcctacttttacgaactcatacgtaatgttttcaccacgtgaatttaatgaagcacctgaaaatacaaatggattctctttcgttggcaagatttctttgccatcttctccaaagaagcgaacgagcatttcaatctcagcaccagccttctttgtacgagggtcaatgttaattccatagacaattgtggccactggatcatcatgtaagaaagcattcaatcgaccttttgaatcaggtgtggccttcactgtatattggaattcagcactagcaatttttttacccaaataactagcattcaaattgccataggtaatagttactggttgatttttgtgaagaacaaccaatgttcctcctgcaccgttattataataaaaatgtgcttttttcgagtctttagttgttaacccgcttgaatctacactaagcatactgataagtaattttttatctttatgtttatcagttagttttttagcgtctatatattctgcagcttttacagaaacaactttggaattttttgttgcttcacgakcgaaaattagcgttttatttactggttttgckacatagccattttcatttttatgtttgttgtattccgcgacttctttctcgtagcgttctttttccgctttgttttttggccgcaatttctggcattttctttgngcaattttttcagttttgggctttaattcagctgcttgttgcgcaaactttttcgcttgntctttttgtaat

SEQ ID NO: 505 - DNA, 1010 bp; double-stranded, linear
acaaactggtatttaaatcttgtcttagcgaaaaaacagctgctaaacaggcaatcataggtgagccacgatggaaaaattgaaataaaagnatacacagcatgacagcaattgctgtttttaacgttcgcatgcctaaacgaaatcgacccactatcataaatattcgctcctaaataacttttctctttaatgataaccgaaatagaggtaaaattactagagaaaagtgaagaattattattttttaaggggagtatgcatgaaaattggtttacgaacagtcaagacagccattagcgctgcattagcaatgattattgcggaaaaactgggattactttatgccccttcggcagggattatttcagttttaagtgttactagcacgaaaaaaacatctgtcatgacaggaatttatcgtttgttatccttagctttagcaactattttagcgtatatttgttttacttttttaggttttacagcgattgcttttggtatttttttattattatttattccagcagccgtgtattttcaattatctgatgggattgttgtgagttccgttttggtaactcattatttagtcgaaaaaaatctttcttgggcgattattggaaatgagtttttattaatgagtattggtgtgggactagcgttattagctaattcttatatgcctgatacagaaaaacgtttaagagaagaccaagaagtcattgaaacaagtttcgtaaaattttaagggaaatggcgctacatttaaacaacgctgcaggagagcgaaatttggtcatgcattgtgcagatttaaaaacctttattcgtacaggtgagacgtgggccaaaaatcatggccgagaatccaattgcnggtctaccccaatacgkactatttagagtactttgcgatgagaaaaatgcaaagtaatattctaaaaamcatgttggaattattagaagatattmcygttgatgcgcaacaagttcgctatattcaacaa

SEQ ID NO: 506 - DNA, 789 bp; double-stranded, linear
gataaactcttcgattctttcgccgttgatccattaaagaaagaagtacctcttgaagaactggcaaaacaacgacaagaagtaaaaaaagaagaagcaaaaaaacaagcaaaagagtaattttgcttgtttttttctatagaaatttttcaattgctgtccaagctgcttcttttccttcttttgtttcagaagagaaaataataaagtcatcttgtttatcaaaattcaaggcttttttgatgacactctcgtgtttgttccatttgccccgcggaattttgtctgccttagttgctacaataataactggcaaatcatagtatttcaaaaattcatacatttggatatcatcttgggtcggcggatgacgtaaatcaattaaagaaacgactgcacgtaattgctcacgttgcgtgatatacgtttcaatcatttttccccacttcgcacgttctgttttagaaactttggcataaccatagccaggaacatccacaaagtgtaaggcatcctcaattaaataaaaatttagcgtttgcgttttaccaggtttgcctgaagttcttgctaaatttttacgattaatcaaggtattaataaaagatgatttcccaacgttcgaacgtccagctaaagcaatctccggtaattgagattcaggatattgkttagggggataccgcactaatcacgawttncygcattatgtacgktcatkgttttccyccgktcytcyattcagtctttcatgcaaaagcttaacanaaacagctctntcggagatcc

SEQ ID NO: 507 - DNA, 643 bp; double-stranded, linear
gggagtgaaacgccctatttggtaatggatgagcgaggaatggccatgtcgacaacagaattggctgaaaatctagcaacactctatgaatcgccaaataatgttttattggtggcattagcgggagaagcgatcattgggaccgcttctgtgtctgcttcttctaaaaagcggatggagcatattggtgaaattggcattagtattttaaaagagtactggggctatggactgggcagtatcctgatggaagaacttattcgctgggcgcatgaaagtcatgttattcgtcgcttggaattaacggtacaggatcgtaatcaacgagcgattcatgtctataaaaaattaggttttgaaacagaggcaattatgcctcggggcgccaaaacagaccaaggtgaatttttagatgttcatttaatgcgtttgctgattgattaattattggttaataattttaatttcttaaataatcgaacgataattgcatgaaaaaacaaaattttcgcaattatcgtttgtttcatatttatttttctgatatttttgttataattatagaagaattaacgaaaaaatgaaaatttattttgggaaggaatgtaagaaatggcgaggcaacgaaaatgaagttaactat

SEQ ID NO: 508 - DNA, 6298 bp; double-stranded, linear
tcttgctcatcttcatatactccgtttctgattttttctttattttcaacgacaattgtcgacatattctggtgcgaaacattgctattatacagggaaatgcacgaagaatcaaaaaaggcatacttagaaacaagaaaactgtctgaatctgctcgctagaatgagtgattcagacagtttaatctttttacggctttaactacgtaagccacgccctgtttctacaaggtaccaacaaatgccatataaaacgacaataaataagattaaaatggtcatagaaataccaattggcacatcttgaacccctaggaaaccgtagcggaacccagaaatcatgtaaacaatcggattaacttttgagacagcttgccaaaatggcggcaacatggaaatggcatagaaaaccccacccaaataggttaaaggctgtaacacaaaggttggcacaatcgatacatcatcataggattgcgcaaaaataccatttaacaaaccagctaaagaaaaaagaatcgctgtcatcaataaagtcatgatgaccatcagccaagaaacaacgtgcaatggcacaaaaaatagagaaatgatggtgactaacgcaccgaccaaaatactacgaccaacgcccccaatcacaaatccccaaataatcacatgagttggaactggcgccacgagaatttcttcgatatttttctggaatttttgtgagaaaaaggaagatgaaacattggcgtacgaacttgtaatggctgacatcataattaaacctggcacgataaattccatataagaaaaaccgcccatgtcgccaattcgcccgccaatcattttcccgaaaatcacaaaatataaggacgtcgtaattactggcggtaccagtgtttggacccaaatccgtaaataacggttggtttccttcacagctaaactttttaaagcagtaaaatacagactaaacatgttgatcctccctttggtacgtatcctcggtaatcttcaagaagagctcttccaaacggttggacttattccgcattgacaatactttgattccttgttgacttagctgttcaaacaagtgattgactccttggtttcgttccacttccaccgctaacgttaactcgtcctcaaatacgctttgatagccttcaataactggcgcctgcgtataaggtgctaaatcaaaaataaacgtttcaaattgtaattttgctaacaagtgcttcatgctggtgttttcaatcaattcaccagactgaataatcccaatgttgcgacacaacatctcagcttcttctaagtaatgggtcgtcaaaataatcgtggttccctgcgcatttaactcttgtaaaaaggcccacatttcacggcgcaattcaatatcgacacctgcagttggttcatctaaaatcaataacttcggctcatgcatcagcgcgcgagcaatcatcaagcgacgtttcattccgccagaaagcattcgcgcccgttcgttccgtttttcccataaattggactgttttaaatacttttcactccgtttcatggcttctttacgagacaccccataatagcccgcttgattgaccacaatctgctggaccgtttcaaacggattgaagttaaactcctgcggaactaacccaatctgttgcttcgcccgcaccatctccgtatctaaatcatacccaaaaattttgactttccccgaagtcttattaactaacgaggtcacaatcccaatcgtcgttgattttcctgcgccattcggtcccaaaagagcataaaaatcgccttcttcgactgttaaatcaatccccygcaacgcttcaacacctgaagcgtacactttgcgtaaatcttgtatcacaagagcatcagtcattcgtaactctccttaatgtataaatattcatgaatattattgtaacacttctcgataaaaacgggggttattttgattaaattttacagttttgcttagctatttttcaacaacaaactagccaacgattaacgtgtttattttgattcaaaactgtttaaacagtttcaagagcgttaaaaccctttcaaatcaaggatttagagttctctttttttggcacagaacttgctttatataaaagtgaggtgaaaagaatgaaaagaaaatttttaattgctagtcacggaaacttagcgaaaggcttccaaagttccttggatattctcgcagacaaaggaaaagagctggcggtcatcaatgcctatgtgactcctgaggactacacgccaattattcaaacgtttcttcagtcccttggcgcagaagaacaagctattattttaacagatttatatggtggtagtgtcaatcaaaaaattgttcaagaagtcatgacgacaaaaccagacaatgtttttatcatttccaatgccaacttagccattgccttgtcgctgattttcttaaaagaaggcgaaaagctaaccaaagaagatattcaagcagcaattgctgaagcacaaattcaattcgttgaattaaacccatcaaatgaagaagaaaactttttttaggaggaaattaaaatgattacacaagtacgagtagacgacagattaattcacggccaagtagccgtagtttggaccaaagaattgaatgcccccttattagttgtagcgaatgatgaagcagccaaaaacgaagtaatgcaaatgacgttaaaaatggcggtccctaatggtatgaaactattaattcgctcagtcgatgatgcgattgatgtcttcaatgatcctcggggcaaagacaaacgaatttttgtaattgtgaacagtgtagcggacgctactaaaattgcgaaaaacgtgacagatattgaaagtgtgaatgttgccaacgctggccgctttgataaatcagatccagccaccaaaacaatggttttcccaagtgtccaattaaaccctgaagagttagaagctgccaaagaattagccagtttgactcacgtggaaagctataaccaagtcctgccaaccaactcaaaattaagtctaaaacaagccgtcaattaaaaggaggaaatgaacaatgcttatgcatgcaacaatggcagccttagctgtatttatctgttttgctgggaattatttaactggtcaaagtatgatggaacgtcccttagtcgttggattagtcacaggaattttaatgggcgacatgaaaacaggggtcttaatgggggcctctttggaagcaattttcttaggaaatgttaatatcggtggtgttatcgcagcggaacctgtaactgcgactactttagccacaacgtttgcaattatttcaaatgtcgaacaaaaagccgccatgacgttagccgtaccaattgggatgttagccgctttcgtggtgatgtttttaaaaaatgtctttatgaatatctttgctccttctcttgacaaagcagcacgtgaaggcaaccaaaaaatggttgtgacactgcattacggaacgtggattatttattatttaatcatcgcttcgatttcatttatcggaattytagcaggaagcgggccagtaaatctgtttgttgaaagtattccacaaaatttgatgaacggcttaagcgcagctggcggacttttacctgccgttgggtttgctatgttaatgaaactgttatgggataataaattagccgtcttttacattttaggctttgttttaaccgcgtacctacaattaccagccgttgcggtagcggtcatcgggacagtaatttgtgtcgtgagtgcccaacgggatgtagaatttcgcgacattctaaaaagaaaactgcggcgtcttctgcggttgaaggcagcgcgaaagaaatcgaagaggaggactttttcgcatgaagttaaaagagaatttatctaaagaagagaaaaaaatgatgcgctctgttttctggcgttcttggacgatgaacgctagccggacaggagctacacaataccacgcagtgggtgtcatgtacactttactcccagttatcaatcgtttttataaaaccaaggaagaacgggcagaggcattggtgcgtcacaccacttggttcaatgcaaccatgcatatcaataacttcatcatggggctcgttgcttcgatggaaaaacaaaacagtgaagacgaaaattttgatgctagctctattacagcagttaaagcctcattaatggggccactttcaggcatcggtgattccttcttctggggcatcttacgtgttattgctgctgggattgggatttcattagccagcactggttcgccattaggggcgattgtcttcttacttttatacaacgttcctgcgttcttaattcactattatgcgttgtatagcggctattcaatcggtgaaagttttatccaaaaaatgtacgaatcaggcggaatgaagatactcacaaaagtatcaagtatgctaggcttaatgatgatgggcagtatgactgcttcaaatgtaaaattcaaaacgattcttgaagtttccgttaaaggaagcaaagacgtagttaaaatccaagactatttggatcaactattcgtcggtatcgtaccattagccgtgacattacttgctttctggctattacgcaaaaaagtcaatgttaacgtggtgatgtttggtatcatgttcttaggcatcttgctaggattactaggcatctgttaaaattgaaacaataaacatttaattattaaacacttagagcctgagacaaaaatccaaagtgatttttatctcaggcttaaaagctgataaacggcgggaacagaagcaacccctgtcccgacctctcttttggaaggacgatgaatcatgcgcttggagacctaccaacacttagttgatattttagaaaccagcaacaccccgatgagcacacaagaaattgccacaaaaattcaattaagccgctcggtaaccagcttatacttaaataaattattggaaaaaggtgaagtccaacaaacgggaaaaaaacccgtttattggcaattaacccgtgcaacaacccccacgaccgatgtgtttcgacaatacatcggtagccaaggtagcgccaaaaaagccatcgaacaatgcaaagccgctatgttgtatcccccattgggtatgcctttattaatccatggagccagtggcgtcggcaaaagctttttggcaaaactgatttatgagtatctaaaaaacgaacaaatcatcggcctggaaaaattctatacctttaactgtgccgattatgccaataatcccgaattgctatcatctattctcttcggccataccaaaggcgcattcactggggctgaatcagaaaaacaaggactcttggcccaagctaataattccgtactctttttagatgaagtacatcgattatccaacgaaaaccaagaaaaactctttcagtttatggatacagggaccttccgccctattggtgaagaaggaaaaatggtgcattccaaggtccggctactatttgcgaccaccgaaaacccgaaaaaagtcttattaccaaccttttatcgccgaatttccgtaatcgtctcacttccgaacttcaaagagcgccccattcgagaacggattgcgattttgaaaaacttattccaccgagaagcgaaacgaatgaccaaagacatcaacgtggacgaagaaatctttacggcattattagaaaatgacgaacctggcaacgtggggagtttatccaacaaagtgcagctcctttgcgcgtcgcaattacgaaaaactttgcccaatcaacctgtcgtcattggcgatgcaactcaaccaatgattgcgattcctttagacaaagaagtgttagaagaagacacactttcttccgatattttcgcaacatttgaagccttatttacaaaagaaaaaacactggcccacttaaaaactgaactgacacaattcattaaatattgtttagacgatgaaataaccttggaaaatgattattttttacaaaacctagtcacggaagtcgataaagtccgtataattgtgtaaaagtaaaaaggccatataacagtccttttacggtacaatgtttttaacgacaaaaacatacccaggaggacttttacatgacccaagtacattttacactgraaagcgaagagattcaangcattattgaatattctgtaaggatgacgtttctaaaatatttaacacggtatttaatcactatggggaaatcacggaccgaattt

SEQ ID NO: 509 - DNA, 498 bp; double-stranded, linear
caaatagcccttgattaaacgccaagacatcgacgcgttcttttttcataagtgccttctttctatctcaattgtaactgagttaacaagtttgctaaatgttcttctgaaaagttgggaacatttgctttgattttttctaaaacagcgctaccttctgctaattgatgtgttagcgcatctttcgcgccagcaatccctagaagagctggatacgtacttttattcaacgcttcatctcggcctacttttttacctaaatctgcttctgtacttgtggcatctaataagtcatcacgaatttgaaaagccaagccatagtgagcgcaaactgtgtcagtaaaccaatgacttcttctgkttgattgggctaatacgcccccagcaattaaggsgrattcaattagcgstccgggtttcttttcatgaacagccgctaaatcttctnaaggcaagctgaatttttctccttcaaatatcacccattggccggaaacc

SEQ ID NO: 510 - DNA, 1923 bp; double-stranded, linear
attaaaagtgnacgacaaaatcaaagccgctttaccttaaccaaaatgaatacgttcatcaaaaacttccttggtagctacattctgttaagtttagaaattttaattgctgctgatattattgaatccattgtcaaaccaacttttcaagatattttgaaattggcaaccttggtgatcatccgtacagttatttcttatttcttacataaagaaattgaagacactatgaccgatatggaacaacaagaaaaagaaccagagaccccaaaaaattagcgggtacgctggttctttttttatttaatcgctttaaaataatgaagtggttcgttagacaaacgctgcattttacgttttttatcttcaataattgctaaaatctcgtctgaaaaattttctaaaataacacggccgcctttataggtgtgtcctcccatttcagcaacttcgctggccgtcaaaatgactttacgatgcgcaatttttttgaaaaattcttcaattaagtacgtcggtaagtaaaaattattttgagcagaaaatgattccaaataaataaaatcatcgatgctgatgaaacaatcatccatcgataagtattcaattgatctgtctatatataattcacgcttttgtaaaatttctttgacttttttatttaataaattcaatgattcaatttctttaaccaaatgttctagttcacgataacgtacttcttttcgctctttgtaagatgaatgtaaggcggcacttgctgtgactattagcgcaccgacgattacaccgaccattccggcgataaaaacaaacatatttttcccctcgctcttttctaattttccattttagtataacataatccaaaagtttcggataaaaaatgacacaaaatttttcaagcgacttcgttgacctttattgaccaaagaggtatacttttcataggcattcaaagtgctttgtgatagaatgactttaaaagtttctttatataggaggatttacttatgaatttaattccaacagttattgaacaatcatctcgcggtgaacgtgcttatgacatttactctcgtttattaaaagaccgcatcattatgctaagcggccctatcgatgataacgtggcaaactcagtgattgcacagttattattcttagatgcccaagattcagaaaaagacatttacttgtacattaactctcctggtggcagcgtttctgcaggcttagcgattttcgataccatgaatttcgttaaagcggatgtccaaacgatcgtattaggaatggcagcttcaatgggtagcttcttattaacagctggtcaaaaaggcaaacgtttcgctttaccaaatgcggaaatcatgattcaccaaccacttggtggcgctcaagggcaagcaacagaaattgaaattgctgctcgtcacattttagacactcgtcaacgtttaaattcaattttagctgaacgaactggccaaccaattgaagtgattgaacgtgataccgatcgtgataactatatgactgctgaacaagcaaaagaatatggtttaatcgatgaagtaatggaaaatagtagcgccttaaattaaaaataaaaaaatggaaacagcgacagtcgctgtttccattttttttatttttcaatgtatccgcgtaattcttcttcagtgacactttcgtcaaagatatactcaccaatgatgatcgttggtacaaattgaatgtgcgccgcattgggcttcagcaatcactggcggganacaagcgttggcatctttttggttcttttaagcccagatttttttcagcatacgtcggctacttcttctaagggtaagtttccccattcatcntgcgtgaaaccattttaggcangctgacacgctggttcaggcgctgaatagt

SEQ ID NO: 511 - DNA, 1613 bp; double-stranded, linear
ttctcgcttaatttctggaaaaggatatgtgagtgccgatagtcaagaaaaaattctcaaagcaatgaaagaattaaattataccccgaattatgtggcgcggaatttacgagcaggtgccacaaaaaccattggctttttagcccctagctatttaggttccttaggtattttcttgaatcgctttatttcaattgccaaaaaatacaattattccgtaaccttattttttacagatggcgatcagcaaaaagaaattgatgccttgaaccaattaaaatacaaacaattagatggcttgtttttattgacacgaacaaatgaatggtcggtgattgagccttacagcgcgtatggtcctttagcaacctggcatcgtatcgattcacctaatatatactcttcctacattgatcattactctggttattatcgttccttagaatatttacaacaacaaggataccaaaaaattggtcatgtcctcggtaatcccgaaaatttaaacacgcacgcacgaaaacgtgcaatgaaagatttttatgaaaatactcaggcaccttggcaaactgagtggctgattaatgatcagtatactaaccattctggtcgcaaaattgcccattactggcaacaattaaccgacaagccagaagctttggccttttataatgatcacgtagcagctgagtttatttcagaacttgaaaatctaaattatgccgttcctcgcgatgtcgctgtcattggctttgataatagttatgtcagtgagttgatgcatattacgactgttgattatgccattcagtatcaagccgaaaactcatttatttacctatacaaccaattaaatcagacgaatattcctgaaaaaaaattaaccgttcgtctagttgaacgacgaacggtgcctaaaaaagacccggcagatcagtcactttgactgatttaccgggtccttttatagttaaacaaggattatttatgcttttgttcattttttaaaatagaaattgactgttttaaagattgaatcatgccgccttcactgtatacaagaacgtttgatttgtataaacgagcagagaagattgttaaaataattccaaaaactgccaaaatcactaatgagacaattgcttccattgttgatgccgtttcggtcgccaagcgtactggcataatgtatgacgaaatcagcggaataaaggaagtcactttcaccacgatattttgtggatcattcgtcccaaacgtaatgccgatcatataaccgattaaaccaatatacatgatgggctgaactgcttttgctgtatcctctggtttggaaacaagagaaccacaaagtgctgccaaaacagcaaaaacgagaataccaataatgaaaaagcctaatgtaaaaataaaggttgatgaaaaaatactttgtggtgaaataccacttaatagacttttcataaaatcaagatttttcaattgagaatagccgagaacaaacgccactccgtaaatgaaaatttgtgttaaagctactagmataaccccagttamtttgccataaaaatgggttgcgcytttgtactagagagaataacttccatgattct

SEQ ID NO: 512 - DNA, 1496 bp; double-stranded, linear
ataaaatttcatattatctctatcctttctataactattaatgatatgaacttttaagtgtaaaataaaacacctaaacaattaatttcatttccaaaagttagataattatttaaaaaatgtttcgtactaaaacattttttagtctaaatttaatgtaaatttagaatcaactgacatctgatattttttaggagtcgtccctgttatctttttaaaaactttagtgaagtgagacgtatctgaaaaacctaataatagtgaaatatcattaataggataattagattttaacattactttagcttctgaaatttttcttcttaaaatataattatgtatactaatgttcatttcttttttaaaagctgtgcgtaacctagcttcactcattgaaaaatattgagcaatctgtcttactgtaatctttgtatacatatttagaccaatgtactgaacaattgatgatatctgaggagaaagattccttactttagcttttcctatttcagaggtataaaatactatagcagtatctctaacttttaatacttcttttaaatttatacatagttcatttttccttataaaactatctcgactctgatatgcatttattaagtccattcccatatttatagctgcttgtgctaacttctcaaatacaactattgaataattctttcagaacgtacgttatccccactaaccacaggwacaacaccattacttagtttaaatatcatattacttaattcttgtacattaccatttacaacatattctaaaattttattttcatataaaaataaataaatttctggatcataattttgagataataacatatctatccgttctatttggatatcttctgaaaattttttctcataatcatgtaacggcttatgaaataagtcttcaatctttcccgtaaaaaaataatttataaggataagaatatctctaatatcccctaatgaaaataatggtaattcatttaataatttatataaggattctttatcagaatgctttatacttttatattgaaccatagaaagtcaagtccagactcctgtgtaaaatgctatacaatgtttttaccatttctacttatcaaaattgatgtattttcttgaagaataaatccattcatcatgtaggtccataagaacggctccaattaagcgattggctgatgtttgattggggaagatgcgaataatcttttctcttctgcgtacttcttgattcagtcgttcaattagattggtactctttagtcgattgtgggaatttccttgtacggtatattgaaaggcgtcttcgaatccatcatccaatgatgcgcaagcttttgaatattttggttgatcgatataatcatgaatcaatcgatttttagcctcacgcgctaagttaatatctgtgaacttaaaaattcctttaacagctcctctgaaagattngaattttttaggatggggnaagaa

SEQ ID NO: 513 - DNA, 683 bp; double-stranded, linear
ggtactttacaagaatcacgtaaacgtgaattctacgaaaaaccaagtgtaaagcgtaaganaaaatctgaagcagctagaaaacgtaaaaaattctagttttgaatgaattggagttggtggtatgtcattgctaaccacattgaatgacgacattaaaacagcgatgaaagctaaagacaaagaaactttagccgtacttcgtatgttaaagactgccattcaaaatgatcagattaaagcgggccgtgaattgaacggagaagaagaactcactgtattgtctcgtgagatgaaacagagaaaagattctttatcagagtttgaaaaggcgggacgcgacgatcttgttgaaaaagtaaaagttgaaatagcaattgttgaaaaatatatgcctcaacaactaacggaggaagaaattcgtcaactagttcaagaggtaatgacgcaaactggcgccacttcaccaaaagattttggtaaagtgatgggcgctatgatgccgaaagtcaaaggcaaagccgatggcaaccaagttaacgcaattgtgaaagaattattacaagaaaactaagagcgttwtcgaaactaggacaggatactgccgawttttttttatgsccaagagaaaccggtagccttttttacggtttccccttttttggacctttccaaggtccaat

SEQ ID NO: 514 - DNA, 793 bp; double-stranded, linear
cgaatagtatgacgtacacggaataatttccttcgtcaactgttttgacttgaataaaaaaatagttatttttagaatacgtttccacgctttctatcaataacttgccgatacctttgcgatgataccgctttttaactgccatacaatggatttctactgtatctttacttgtttctgaaagtgttataaaaccgagtattttattctctacatcctttgccacccacataggtaaagtgctagctatatcgatatacttgcgggtctctttttcaaggccaaaccattctggaagattaaacaatacttcttgtgctgcctgagtctttttatctgcatttttttcccttataattgtaaattctttcaatttacaacctcctttttgtttacataacaaaattattgtatacccaatcttttttattaaataatagcataggtagtttaaaaatgtaagttagtcatttattctttattatttccttaaaacgacgccttttctcgctaaatctgccctttctttatttttttctgttaaactaaacgtattaagtctatgaggagcgtgcgtatatggattatctgaacacttataagcggttgctagcattggcagatgctggtcttttttacgggaaagatgcttttgatcaagaacgttaccaagaactacgagaacttacgtkamaacttattagcgcaaccggacacgaagcgactgtctggcccgacttaggaaaaaaccttacctaaagaaganggtatccaacaccggaangtagatgtt

SEQ ID NO: 515 - DNA, 2805 bp; double-stranded, linear
ataaatggcgtcgatgatgggaaaacttttcttgatcatatcgacgataaaataacgtttctgcttcaataatagagcgataacgttgaggactcattgtacgataatctaaaacagacaattcttgttttaggtggattggtaagacttcaatctttttattggcttgattcaattgataaaagaaccaatgatctaaatagtccaaaggaaattcttccgaaaatccttccaaccagcgcagtgtttctgccgtaatgactgtaccagaattgatagccatcaacggttggttggctatccctgctgttggctttgctcctttaagtccaacatattgatcactataaactggcgaaatttgttgtccatttgcttctacaattggaacatagactgccacagtcggatctaacggcatgatgatcaacgtatcaaaataagaagctggcacttctgtgtcttggtcaaggagcaacaataattcacattgattcgtttgactaaaagcaatcgcttcattataagcggtcgctaggcctggattatcaggattatgtcgataagtaacattttgttgtaaaaataatgcatcttcttgaggaagtgggctgttgtcataaataaataagtgcaattcggggtgatctaccacttcttttaataacaaataattcggcgtatcagccattttcatttgatataagacgatgactacctctaatctttgactcattaaaagaacctccagccccatttgttaaaaaattttcccattgattgcataaagattttaaacaattttcgacttttatgggcgcccttttcatacatgtgaacaaccgtttcaaaaggcgtatagagaatccgatagcctgctttgccaaaacgtaaacataaatcgttgtcttcaaagtacatgaagaaacgttcatcgaacccaccaatttcaacgaatttttcacgatcaatcaacataaaacagcctgagcccattttaatatccgttgtttctgtatccgacaaatcgcgacattcataaatactcaaacgtttatcaaaaattttctttacaaattgaaagggaataaaacgtaacatataatcgaaaacatctaatttttgacgaactaaatattgcgtcgtgccatcttcatttagcactttagggctaacgactgcaatgttcttatctattttgatacggtttaatagacgatcaagcacgtctttagtaaccaaaacatcgggattaaaaataattgcatactttgtcgaagcattgaataacacttgattatgaccatgaccaaacccttgattttcttcagcgcgatggatagtaataaatggttcatatgttgttaatttttcaagatacgctgtttcagaatgattgtcatagatatgaatatcatagatactatcagtacccagttcggcttttaattggtctagtacattaaaaatgtaacgactattataagtgacaatcgagattgttaccatttcttgcatgctcatttctccttactactgaaacatcgtcttaaaaaaaaagcatatgtttcacacatatacttttttaagtttaatggaattatatcataggtttacgctctcgcaaagcaacctaaagatttctttactttctcttagaatgcttgccaagtcgctttttcatttgctcctgacgatattcacgattccctaaaatccgtaacaaatacatcaacggttgatgtccttcgccaactagaccgattagttcaatgaatagttctaagccaattaaacaaaagacaattaataaaattgatgctactgtacttgaatagctgaacaataaagagacaaaggaaaaaactaacgctaatgcataaatagtcatgaccgcccctttatgggtaaaacctaaagataacaagcggtgatgcaaatgcattttatctgctgaggaaatgggcttcttgttcaatagccgtcgaataattgcataaaccgtatccgtaattggcacacctaaaatcaccattggcgtaattaccgtaataaacgtagcatttttcaagccctgtaacgacattactgcaatcataaacccgaggaataacgccccggtatctcctagaaatattttagccggataaaaattgtatgggaaaaatcccgcaatgctcgcaactaaaataaaaataacaattgggatatagaccgttttagcatgtaggaaaaaataccctgtaataccaatcgtggttaatccaataatggatacgcctgatgctaaaccatccaaaccatcaattaaatttactgcattcgtaatcgctaaaatccacaataaagttagtggtaaactaaaccagcgcaaatcaatcattccaacaactggcaacgtcacaaaatctatccgaattccagcaacaaaataaataactaatgctgctaacaaaataccgattgtttttttcattggagtaatttctttaatatcatcaatgaggcctgtcaaaacaaccattccaccagccaaaataatcggccaaatataatcttgtgggataatcgaacgaaaaatcaataaacatgaactagcaaaagcnatgtagattgcaagtcctcckgctgtaggcatatttttggtattgattcgtcgctctcctggtgcatcataggcgccaatccgaaacgctagaagcttaacaagtggtgttaatagcaaagataagataaatgtcataaataaacgtatcaaaacttcataaataaatagtgacatagtcgaacccactttcttctcgt

SEQ ID NO: 516 - DNA, 5101 bp; double-stranded, linear
aaaggtggcgtcatcgaaggaaaagtttcttcagtggaacaaattactgcgttggcaaaactaccaaaccgcgaaggtttactatctatgctattatctgtattacaagcgccagtccgcaacgtggcttacgctgtcaaagcagtggcagagaaaaacgaagaagttgcttaattgcagtctaattcaaaccaataaaaaacaaacaattttaatttaaatggaggaaattcaaaatggcattaaacattgaaaacatcgttgctgagttagaaacagcaactatcttagaactaagcgaattagttaaagctatcgaagaaaaatttgacgtatcagcagcagctcctgtagcagtagctggaccagcagcaggtggagcagcagaagaacaaactgaattcactgttgaattaacagcagctggcgatcaaaaagttaaagttatcaaagcagttcgtgaagcaactggcttaggcttgaaagaagctaaagctgtagttgatggcgctcctgcaccagttaaagaagctgtttctaaagaagaagcagaagctttaaaagctgctttagaagaagttggcgcttcagtaacagtaaaataattcattcaacttttgaatgttcgagaacccttgtgttgcaagggttcttttttattaagcttttaaatggtggtaaagttagtgaattgattgtcaaaataatcttcgtttaataaagtgcttcctagctaaggaaaatccagaggatcttaacctctggatttgataattttctataaattctcgttaccaatattatttgataaaaagcaaattatttaaatagtgactgaatagtaggtctatttctttttatnttttataatgaatatactaactaaagatagtaagatgattccaatgatagtaaataaaactgattttttttcgccagtactgggaaatatcccctttttgtgctcggttgaacttgatgtagtagctttcttcgaactgctcgtagttgtttgtaatgtagattctgtattagtagtatccgaagaaacactttcagcactttgattaattgacgtataatcgtttgcttttattttatctgccattgctgctaaaccataatcaccacggacatcagatgggtaattttggttagcgtagtctaccttgacttgattaattaaatcgacgagtgtttgatcgcttaaattatttacaacatcactatttaaatcatatacataaattaacgaaagtcgaatttgaggtaaataattttttaagtcatcaatcgttaatgttgagtaatctgtagagtaggagtcctccgggataggtttctcaccatataatttagtaatcattctcgctgttccactgatgtcttggtttacaaaatgaaacgaaactttttttgcgtagtccagttcgtcatcagataaacgatttatcaaggtttctgttaaaccatacatacctacgtaattaagaagtgtttgacgaagcgatggaagttcctcgctttcagctgtaagtgctgttgaatcagttgaagcattaattgttgttgctgaagtttcttgagttaaagaagtaactgttgacttttccacagaagcttcattagccgaatcttctgcccatacattagaaactgatagtgtggtaatcgaaacaaaacaaaagagtcctaaaaacatttttttcattttaatcattcctttcgttacctattgtaacatttttgaaatatttttgtaacaattaaatattaagaaaagcttaagaatatatactaggtgataaaaaatataaattttaaactattaatctatcaaaaatacgatccgtagagactattacattagtgtcaaaatatttcaaaggtgttggttaaagaagtactgtatttgcttaatggtagtttcgagtaaattagtcattatataaaagattgacaagtatgctgcatagcgaaaacttcgtcaatcttttaaaaggataaaaatacagatttaagaataatgacaatttattttaagtcaaaaactgttgacgatattgtcgaggtgtcatctcttttttctggaagaaaaattttgaaaaataagaaggtgaagaaaaacctgtttcaaaactgatttccgtgatggttaaggaactttttcttaatagagaacaggctttttgcaattttaagttttgtacataaatactaggatttgtttgttcataacgctgaaatagcttaaataaatagctacgatcaatgttatactcagaagctaattgactaattgaaagattgtttgaaaaattttcgtgaatagccatttttatttggttaaataattgttggctttgattttcgtgctgtgtaacggaatgatgctctagataattcaacaattgaaagctttcacttaagctgccaaaatgattatgtttcttcgcttcttggtaaatatttttaaataaactttctaatttcttatcaacagttccttttaaaatacaattttcggtagtcaggcctattttttctaaatactgagacgaaagatctccaacaaaaccgacccaatgataggtccaaggattttgccgattaggataataaatattgcgacaattggctgggatcataaacaaatcgccagcggtaatgtgttgtttttccataaagggtgttgaaaaatagccttcaccatcgctacaataatgcaaaacccaataattaatgggggcaaactcagttggttttgtcggacggcatttttcatagccagcttcataaagatgaaattcttggctaataggttgatcattaatcaggatgctgacattatttgtaaaaacattttgcatgctatcacctctttataagagtatgtaaaggctttctaaaagtcaacatctttacaagaaataggcaacattttttatttttaaaaaactgtaagcgttttacaatgtgtgagtactaattaatttgataaagagaggatgtagtaaaatggcaacacattcacgggaacgattaggttctgtcgcattgatgctcatgactttttcagcggtttttgcctttcctagcattgttaacaacagtattcagattggcctagcaactattccaggctatttattcggctctattttttactttttaccatttattctaatgattgcagaatttgcttctgctaattctgaaaatgaatcaggtgttcacagttggttggaatctgtgctaggacctaaatgggcatttttaggcgcttggtcgtatttctttgtcaacttgtttttcttctgttcattgctaccgaatacattgatttatggttcatacgcttttttaggtcaaaacgtttttcaaggaaaccatagcactaaaataattgcagtgatttctatcctgttattttggttaatgacatgggtttgtattaaaggggtttcgtggatttcgaaagtgactagcttagcgggtggtgctcgtttatttatgggcgtagcttttgtggttttagcctttgtcgtcgtgtttggttttggcaatgagccagcacaagagtttaccacgacgtcaattatgccaacttttaattggacttttttcatgacgatggcgtggattttacaagctgttggcggtggtgaaagtatcggtgtatatattaaggatgttaaaggcggcaataaaacgtttgtccgcacgataattggtgcaacgattgcggtcggtatcatgtatattcttggtgccgttgctgtaggtttggtagtgccaacggacgtcttaaaaggaaatttttcaaatggtatttttgatatttttaaaattttaggtacgtatttccatattcccgcagcaatgatggtgcgcttagtaggaattatcttatttgtcggaagtcttggttctttggctctgtggacggcagcaccagttaaagtatttttctcagaaattcctgatggggtcttcggtaagtggctagtgaaaacgaacgaagagggaaatccaaccaatgctttgttagttcaaggaattattgtgacgattttagttgccattccagcattaggaattggaaatatggatagctttttagaaacgttaattaatatgacagcttctacgtcattagtgcctgtcttgttcttgttaatcgcctatattgggcttcgttggaaaaaagaaacaatgccgagaagtttccgctttggtaatcgaacctttggcttaattgcgggaattttcttattagccatttttatctttgtattctttatgtcaactgtgccggatccaaaattaatcatggaagaaatcaattgcacgttaccgaaaggaaccgctagtccactgggcatgttggcgtataacatcattgggttaattgtctttatgggctttgcttggatttgttggaaacgatatgaaacaaaagaaaaaaatgaagttggtaaaggagaaatggattatgaagacttgggaaaattataaagtagatagtattaatcggttgcctggacgagcacacttttcgagctttccttcgaaagaaacagcgttattaaatgaaaataaatatacacaagcatacaaaaatttaaacggatgctggcattttctctttttagaagcgccagaatacagcccagaaaacttttttgcgacggactttgatacaagccaaatggatcaaatcactgttcctggaaattggcaagtccaaggatatggcaaaatgcattactctgatttatggtacaattttcccattaatccgccgtatgtaccaacggaaaacccaacaggtatttacaaacggacatttgctatagatgaaacatttcacgataaaaaaatcattttacgtttttgtggcgtagattcagcttatcakgtttgggtgaacggccatgaagttggctacagtaaaggtgcacgaaatgaagcagaatttggacattacgccttacgctaaaattgggtgaaccaaatgatttamcgggcgagtctatcaatggtcagatggkacgtatttwrgagggtccaagatattntggnngggttaagtggggat

SEQ ID NO: 517 - DNA, 1084 bp; double-stranded, linear
acaattagatggtacccgaatcggctttatccttaaaggcatcgtcgtcggaattcttgtcggctttgttgtcagcttatttcgcttaggcattgaaaaaattggcgaacaagtcgttcatctgtatcaaacgtttcacgaaaaaaccttttggatgattccttggttcttattttctctcgtgcttgcttatttattaggacgactgatcaaaagcgaaccagcaattaaaggcagtggcattccccaagtggaaggacaacttcaaggtcaattagaaattcactggtttccagtgctttggaaaaaatttatcggtgggatcttagcgattagtcctgggctatttttgggacgtgaaggtccttcaattcaactaggtgcagtggttggacaaggctatagtcaatggcggcaaagcaccaagtctgaagaaaaaattttaatcagtagtggtgccagtgctggtttagccgccgcttttaatgcaccaatcgcaggacttttatttgttctagaagaggttcaccattccttttcacctttagtttggttaacctctttttctgcggccatttccgctaactttgtttctttgcatttcttcggattgcagccagttctttatattggtccggttaaatctttgcctttagagtactattggacattagtactgctgggcgttttgctaggattattaggttggatatatcaaaaaacattgttgtccttaccaaaagtatatggaaaaatcaaaggcctttcttctaattattatggttttgtttcttttattttgattttaccgattggttatttctttccacatttacttggcggtgggaatcaaattgttttagctttaggcaatcaaccgactacgatttgggctttagtcggcttactggttttacgttttgttttttcaatggttcttacggtcgaatctccctggtggatttctgccattctaactttagggcatatcggacatgatggagcactgtccaaacgaggaggancatttggaaacttaatttgcangcggattacggtggaanacgtacacgtattagacaga

SEQ ID NO: 518 - DNA, 2677 bp; double-stranded, linear
ccaccttccaattttggtccaagttggggttagcgggargcacgcaacrgcacagcttgaaaaaagccgctgattattatggcaacggcacacgcaatccctatctgcggatcaagaaaacccaagcgaattggagcttaacggcgcaactgtcgcaaccgaaatcagcgacagacagcttgccaacagcgacccgcttattattaggggcggctcctgtttcgagtttctcaaattacaaccaacctaccgagttgaaaaatgcggtcggtactacgagtgccattagtttgaatgccaacaacacggccactaggattattgccaatcaacaattcactgggagtaatatctatcagttggacttcaccttcaacaatgtcaaacttgaagtgccagccaaccaaggggtcaaggggcaacaataccaagccgcaattacgtggaacctagttacaggtccttaaaatagttaagttatcatgaggaaagctcaaaatgttagtatcaaacactaacattttgagcttttgtttatggaaattaaggaatttggctgaaaatcagaagcaaaatggcagattctcttaattttcgagtgtttttctagtgaaaaaggactcttctactttggtataataggaatcgtcggaaaagtagcttagctgtagcaaaatttgaaatttcagggccaccttttttttgatagaataatggagaaaattaaaagctgtacatataccaatgaacaataaatcaatacataaaaaaggagaatagcatgaatcaaaaatggcaaaagttacttccaacaaggaactcactaagaggtggttcagcacaagctatcacgactgacccttgcgccctgtatgagggaacaaggggcaagcaaatcttagcattctcagcatagccttcatcggcttggcgggaatggtacatagaaagaagggacgacatgaagagaattaactggcaacgcttagcaaccattggcttgtgtagttctttagtgattaacgccttttttggcgtaacagccattgcggaaacagtcacgagtgaaagtagcccgacagtggcaaatagtattaaggaagcaacaccagcaagtagcgcaaggcaagaaagtacggaaagcagtcaagaaacgactgaaacgagtcgggaaaaagtaacacaggaaacagcgaaacaagcagagacaaaagcgccactggaaacaccagagataaaaacaaacacaacagcacaacctgcagaaaatagtagtgaaaatgaccgacaaacgagtatttcgccacgttgggtgccgaataatcaagtgatttatccgagaataaccttggctttcactaatgaatcagggcaagcttttgctgatgaaaacttaacgttatcagggacgtatactaaatttggatatgaagacgcaactagtttatggcgaccatatgcggttaattatccaattacttcttctaatgcaggtggtggtcaatatcgagtagctgtcaatgcaacggttcctttaccatacgattttttcacagatttaccagcaaattataggatgaatatatacgcggttgaacaattaaagattgataacacgctaaagtatgtcgacagtattgttgctgtgcccgattctacactgaggatgaccagatatagtgcgcaacaaacaactgagttaccgcagtttggaaatcatatgactccttttgtattacgcacaagagatagcatattttctaaaagcagtgaaaatgttttctctctaaacacggatggtaatgaatttttaagaatcctgagtgtcgcccccattggcactccagtagaaccagtattatacggatttgatggcactgcaacgtaccgagaaacacttaattacgtagtcactcggaaacaagtcaccgagaagttcgtagatgctaacggcgtagctatcacgccgccaacaggttttacccaaaacaagaaaacaccaatgaccagcaatgacttcaccttcaaacaagctagtactttgccggacacctatcaagcagacggcaaaacctacaaattcaaaggctggtacaaaggcaaaaccaagccaaataccttgaccaccaccaaagcgccaagctatgcggtgacctatgatgggaatgacgatttgacggtggtgtatgaggcgattcaagaaggaaaaggaatgtcatctgttcaggtgatgaataaggcgattcagaatccagtgactttgcctgatcgcatgtatcgtgtcctatttatcaatgaaacaggggggctgacatttgctgatcgttatggctttactggagaattagttgaggttgcggatggcaaagtgacgccaattggcccagtcccgactaacaataatagcgcagtaaaagaaatcactataccaggtcgggttttcgatacagaaagacctacgccgttgcaatatggagttcgcaatgcaacctttacgttgcccaaaatgtataaaaccgtaacgtatcaacctggcccaaattatacaggtacagcctactctattccagaaacgtatcgtcttagtttaagaagtggtgtcmaamgtgacatcgatacmactggatggcgaattggcttgacccgacaacagatccacaaaagtttacgatgagcg

SEQ ID NO: 519 - DNA, 1494 bp; double-stranded, linear
agattgtccnaattttaattcccaatccagtgcccagtatggcngggatgttttccntccttgtgattaaaatcccnaaccagtaaatgtgtccaaatttggaccacccagtccaagtgaccaaatatgaggggtatgttttcctccattgttgggaattaccaagccattagatgtaactaagtttgatacatcccaaagtgacagatatgagtgatatgttttatggttgtaaggaattacaaacattagatgtgtcgaattttgatacgagtcaagtgatatatatgagtgacatgtttggtgagtgtagcggattacaaacattagatgtgtcgaattttgatacgagtcaagtgatatatatgagtgacatgtttggtgagtgtagaggattacaaacattagatgtgtcgaattttgatacgagtcaagtgataaatatgagtagtatgtttgctgattgtagaggattacaaacgttagatataactaattttgatacgagtcaagtgacaaatatgagtagtatgtttgctgattgtagaggattacaaacgttagatataactaattttgatacgagtcaagtgacaaatatgagtaatatgtttgatggttgtagaggattacaaacattagatgtatcaaagtttgatacaagtaaagtaaccggtatgatttatatgtttagagattgtagcggattacaaacattagatgtaactaagtttaataccagtcaagtaacatatatgtggaatatgttttctggttgtagtggattacaaacgttagacttatccaattttgataccagtcaagtaacaaatacggatgagatgtttgataattgtgatgccctaaaaaagataacattgggggctaaatcaatatttgggactaagactaatactaacttgccgtctatagcagrtacttctttgtatactggaagatggattggagtaaacacgagtaacacttatagtgatagtaatacatttatgtctaattatgacggatcagttccagatacgtatgtatgggaaaaagctagcgttctaaacagtactttagagccttcttcagtaagggttcattcagaaagtgaagtagaatggacttggaaaataactaattcgtcgtctaagtcagccgagaatgtttactcagatataaccttacctgagggtcttaaaattgacaagaatagtgtaaaaaagaacaatttgcctgtgtcggtagatgatattaatggtatgaacaatttaggaacactatctagtaacgaaacagttacatttacgtttaagacaatagtatcagggaaaccagataaatggttggaattaatgggaaaagtgactkgggaagataatgcmtccgcacagtcaatagttctaataaagtgraaatcatcgatgaggagcaaaaagataaagggaatcaaacaaatgatttagagttattatcagttccagttgggtttcg

SEQ ID NO: 520 - DNA, 884 bp; double-stranded, linear
tatttatgctgattcgttactggaacaacgtattaaagcaattaaacgtatggaaagaactatcgcttaaaaattaaaaaaattagtctattcttttgataggcttttttttttaaccgaaagaaaacgcttacgcatttttctatcttttttttcaaatcatattattcaattaaaaatgattctaatttcaagattatttttttcatttcttttttttcgccgtcaaataccgtcaaacgttttaataaacatctgttatttcaaggtagtatatagtttttcatagttttcaataaactaggataaaaaacttgtttatccattacattttaccatcaatctaatcttttttgaaaaaattggtattaacttcttaagtaagtttatacatatagttagttattttaaaacaaagaggagagaaaagagatgaaaaaaaatttagtagtaggtttcgtatcaagtgtcgctttagtaggaattgctatcgcaggagggggtaatgttcaagcaactgttactgatagtgcaagtactgatataggaattggattttcaggacatggaccaggaacgacaccgggaccgttggatattcaatgggctccaataggattagattttagtaattcgaacatggtaaatactacagccgtacaagcatttcctgaaaccactggaaccaataaatatgttgttgtaagtgagaaacgttccaatgagccaactagagaatggagtttgactgcgcaattatcagacttgacgaatgcgggaaggtcaganacacttactggggntggactaaaagtttgtgctgctgtaaaaaggatacactggaacgantacaccagaaagcccaggatcaattgtgaaanaag

SEQ ID NO: 521 - DNA, 2583 bp; double-stranded, linear
gaaacgtacagaaacaagacaattagaagtacttaaatatatatacgaacaagtcgaattaaagggctatccgccaaccgttcgcgaaattgggaaggctgttgatttatcctcaacttctaccgttcacggacatttagctcgtcttgaaaaaaagggtctaatcttacgtgacccaacaaaaccgcgagcaatcgaattaacaccagaaggcttggaaaagatcggaattcagccgacaactattccgatgttaggtgtcgtaactgctggtgaaccaattttagcggtggaagaagcatcagatttcttcccgttacctcckgatttacgtacagaagaaaatgctttattwatgttgacgattcgaggagaaagtatgattaacgcaggtattctagatggcgaccaagtgattgttcgtaagcaatcgaatgccaataatggcgacatcgtaatcgcaatgaccgatgaagatgaagcaacctgtaaacgattcttccgagaagtagatcatatccgcttgcagcctgaaaatgatgcattagcgcctattcttttagataacgttacaattttaggtaaagttgttggtttatatcgcaatcatatttaataaaaaaaggaagtcactccgttgagcggcttccttttttgcttgttaacagtgaatagccttttgggcttcctcgataacctcttcttcagtttctacagaaagtagataatttaaagcttctaaactttgctcgggttcyctttttgcgagctgacctaacgaccaagcagctgttccgcgaatgacaggacgctgatcatttaaacagagaataatttgtgggatagcttcacggccgcccaaattcgtaacgcaattaaagcattccgttgcaatggttttttaccacgccaagagcctgctaagtgtccgaattgctgtttaaactctttattggaaatagttawtaacggtgctaatttgggataaacttcttcaatctttggttccatctcttcatgaaaatgaaaatcttttcctttattataagggcaaaccagctgacaaatgtcgcaaccataaatgacgttacgcatttttttccgatagtcttcaggcatcatgccttttgtttgcgtttgataagacaaacatttttgagcattcattcgaccgtcccctaacaaagcccctgtaggacaccctgtgatacaacgagtacaatcaccgcaaccatttggaacaggttcatctggttcaaattgaatattggtggtcacctcacctaaatatacaaaggaaccaaattcttcggtaatcagtagaccatttttaccaatgaatcctaaacccgcccgctgagcaacagcggtgtcaacatattcgccagtatctacttgcggccgaaagcgccagtgtyctttttctgcttcagtggcagcttgctcttcaataaaagcaattaatttttgcaaccgatcctgcaaaatgtgatgataatcaattccccaagaggctcgcgcaaattgtccacgcttttcatctctaggcattttttcctgagctttggtgggataagctaaagcaatggagataatacttttaggatgctcaaacgttttttctgggtaaattcgttcttccacattttgatgttcaaatcccgagttatatcctcgctctcgttgttcatgcagagaatcttctaattcaataaatggttcagcatgagtaaagccgattttatcgatgcctaaacgttgactctcttgaataattttttctttcaatgtcggcattgctcatgactcccttcattttattatttatcgtttcgatgatacgtttcatagtcatgtgcatagagatttttctcgtccacgacgccgggaacagtggcaactttttcccaaacagaccagtcgatttctggaaagaaggtgtcgccttcaaacgtttcatgaatcatcgtccgatataagacatcgcatgcgggaatcaattctttaaaaacgacagaacctccaccaataacggtcacgccttcatacttgtcagcatacgcaagaatttcctctacggaatgcataaccaaaacgccttcagcttggtaatccggattactggtaagaacaatcgttgttcgatttggtaacggacgacatcccataccttcgaaagttgcacgtcctaaaaccaatgtattatgaattgttttttccttgaaaaatttcaagtcgttgggtaaatgccaaggcaatttgccttctttaccaatcactccttgttcatcttgggcccaaatggctgctaacatagcttctctctccttttttatacggcaatcggcgctttaatcgttggatgtgggtcatagccttctactttaatatcttccatatcaaaatcaaaaacagaagccttgtctggattcaaaacgagcgttgggaaagaacgaacttctcgtgataattggttcttggcatttggttccacatggatttttgatataagtgggggcatctcctagcgtgntggtacaaactcccccactnctaaanctgtttcatgcggcaatcagatgt

SEQ ID NO: 522 - DNA, 965 bp; double-stranded, linear
gatggtttttcgatcaaatttcttanncnctgtagcagtataaattagtaataacttactcagagattttatagagaaagacgttgttgtagcttctcttaattgctttaactgcttttgcaattttaacggatttttatcttttaataatttaattttcgttaaacgaaaaatgtgttcctgatgctcaaatgaacgttcagcatctgaatgactaaaacgaagatattctgaaagcacctcttgatttacagcaacttttccttttggtaaaaaccattctttgccattttgatctattagatgccgctcactttgatttgaaataacaatttctttatcgtcttcaaaaagatacgaaaaaagcattgctttttttataattatgtactcagttacttcatatgaagacaattttcttaattcttctatcaaactattccattgattattttgaacaaatttacttagtttgtgaataggtggtactcgtaaaatgaacttctcatctttctctattttcacgatataaaaagttgtgtctaagtcattttcccaaataaacaaaataatcatttactgccccctagacttgttgttccgatacttaatagtcaaataaatatatttaggaatttgcattaaccgatcgtatctcttcattgtcaaacaacgatataaccattccaaattgtgatttatataaaattctggcgctctttttactgatccagctaatacgtcaaaagtamcgcctacgtctaaaaatacattagctgtcaggtgatcaattgtttgttccaaaaaaatctcttgtttcggtgaacctaatgctacaaagacaaaccttggktcagctttgktaawttgktccacaatttcttgctgttttttctttgtatagccatgtaaaataccgctaataacaatccctggatattgtcgttgaatatttttagctgctg

SEQ ID NO: 523 - DNA, 1108 bp; double-stranded, linear
catnccggggatacaattggtggattggctttaaactatattcattttgcgacaagtgaaagtaagttataccgtgcgctttatttagaagaatatggtggcggcaaaaaaatgccaagaattctcttatcactattttactgaagcggtaaaagctgatcctgagtatgctaatttaaacgatgttcaaattgactctttacacatgggaacatgggtggtcgctactggtgtggctgcattgatgacttctggaattatccatccttcagaagaacaaatcattcatttaatgaaagatagtattgaagcaattcttgaacgagatgaaccaattgatattgacctataaaaattaaaaaaagtgtaacctcatgctgataacttctgtgaggttacagcaaaagactgtttcttaaaagaacggtctttttttgttaagtgtattaatggtagattattcgcaaccatgctacagtaaagaagagaaatagaaaggggcaaaaaacatgaaccgagtgaaagataagcgtttatggctaagtattgtaggaattaccggactagggctcttgtcgggcttattttcagtaaatgcgagagaatattatcaagcgttgagattaccaagttttgctccgccaggctggttatttggaccagtgtggttggtgttgtatatttttatgggcattactttttatttcatcttagttcatccaaataaacaacagaaaaaacggatgattacgctatttattttacaatttattgcgaactttttctggacatttttctttttttctttacaaaataatttattatctgtgattgatatctcattgttatggctattatyaataattcaacagtgggactacttgcgttataaattaataacgcgtggctggttgatgattccttatattctttgggttacttttgcggcagcattaaattacagtattttatttttaaattaggaatatcaaaacaccagagaaaaatgggaactagccatttttttctggtgttttttttatttatttcaacgtagttattctgcggcagttgctaattttttcgcaaattcttctaaacgttggat

SEQ ID NO: 524 - DNA, 2349 bp; double-stranded, linear
ttagtaatttcctgtacttctctccccatacaattcataatatcctcacattgtttcgttgtacgtacatcattccataaaatagcaggacgaattatttcattatccttgtctaataatactaaactatgcatttgtccagatatactaatccctttcaattcttttttcatttcgggaaattcactcaataaatcattaattacattttcaattgctttaatccaatcgtgtggattttgttcactatatcctggtcttgaagaaaacaatggataatctgatgaagacgtagcaatgacatcccctatttcagataccaataatccttttaatgaacttgtacctaaatctatacctaaaacataactcataattattaaatcctttcaaaaaagctgaaatacctacaaaagatatttcagctcatttttcttaatacmgataatcatttaaaatattttttacatattctatatgacttgattctattattggttcatcattttttagggcataattagttaaactttctaaattttcttttccagaaataatttttgctccaataccttttttaaacgatgaataacgctgttcttttagatcctcaaagaaacgatcctcttttaatttcatcgcactctttaatcctctcgcaaatgtatccattccagcaatgtgagcaagtaataaatcttccatttcaaaagatgaacgtctaactttagaatcaaagtttattcccccaggttcaatacccccattttctagtatttcatacatagctaatgtaacatcataaacattagtaggaaattcatctgtatcccagccaagcagaacatcaccttgattagcatcaattgaacccaaggcaccatagtttcgagctacattaagttcatgttcaaatgtatgtccagctaaagttgcatggttagcctctagatttagcttaaaatccttttctaacccgtattttaaaataaatgccatagtagttgcagcatcgaaatcgtattgatgttttgaaggctctttgggttttggttcaatcaaaaattgtggcttgtgtccaattttttcaccgtaaaatatagccattttgaatagacgcgcaatattatcttgttcaaacttcatatcagtatttagtaatgtttcatatccttcacgtccaccccaaaaaacataattttctccacctaatttttttgaaacatctaaacctttttttacctgagcagctgcgattacgtatacgttkgcattatttgtagatgctgcgccgttgacataacgaggatttgaaaacatatttgcagtattccacaatagtttaataccagtttcatccatcttttcttttattaaatctgtaatttcatcaatattagaaaagaattcttttaaagagttaccttctggagcaatatcaatgtcatgaaaacaaaaatattcaacatctagcttttctaaaatttcaaaaaaagctataactcttttttttgcagtctccataggagattctcccaaccaacttcgcttattaackgcttttccaaaaggatctgaaccgtcttgtgtcatagtgtgccagtatgctacagcaaatcgtaaatgttctttcatagtctttcccataattatttcttctgagttatagtgtcgaaacgcgtacatattttttgtgttcgttccttcatatttaattttttcgatttttgggaagtaaaccatgttaaaagtctccttatcatctttaaaattgttatttcaattcgattaatatttttataatttatatactattgaaaattaattagtcagaggtagttttaattttactcttcctcttcttcagcaatttgtaacttcggtattttaatactttcggtacctattttcaataaatgttctacaagattttcctcttttatagcaaagaatgattctaaaaccattcccaaattaactccagttattacctgaattcttgagtcttcacttgctagcatcatggcagtatttgctggagtcccacccatcagatctgctaaaatcacaattctttttgcatcatttaaagtaccmataattttatctaatttattaaaggtcccttcaataccatcatcaggcgtcatagaaacaacaggataatttatttgatcacctawgatcatttgagccgaattcaaaatttctttcgccataaggccatggctcattaaaattacttcgttggtcataatgatctcctttacaatatatcttttaaaaaagtctttttatcaccgggggccataatngtggtaattcatatctcgacttaatagttccnca

SEQ ID NO: 525 - DNA, 1735 bp; double-stranded, linear
tacggcgtcgaaagaaaaataaatagaccgtactaagaataaaaaagcgactgaacttttcaaaagatcagtcgcttttttgtgcttatttttaattttaagcccgtttaagccgttttaagtatttttctagtaaaaaagtacttagaaattaaaaacggctcttaaaacgcaaatatgagccaaataaataaattttaatttttatcagtacgagcgattttttacgtactgcccatttacatgcaaatttaaaaattagcaaaaaatcgttccgaatttgcattttaaatgggtaaacttgcagtttaatcgcatagttctcgcagaggctaaaaaataaaaaagcactgaaatatttcagtgctttttttatttttcttcttcaatttcgttgattgtctgatgattaatttttcttttttcttcttcggttaattcgtgaagttcactcgccaggtactctttctgattccaaatataataaatttgatacaaatattcagttggatcaatttctttgagataatccaattctccgttttttagtttctttctcgcctctttaaaaagtcctgaatagactaaaatctgcttaccttttaaagatttataatacgcgtcaaatattttttgattgataagataatcgctatctttacccgaatacttcgccatttcgtataattctttgttgttattttgcttaattttttgaacatggacttgcgtgatctccggcattcctgtgacatctcgccacatttcgagccattctttttgtgaaatataaaccttagaatctttaaaataagatttatttacagcaattaatacatgaaagtgcggattaaaatcatctcgttgcttgttgtatgtgatttctaattttctgacgtaacctttcatcatcgctttaacattttttcttttcactaactttccaaacgataaattatatttttttatttcatcttctaattcttcagctttcacatttggtgtcgttaaggttaagaaaataaactcttttttctcttcttgcttaatgtactgcatcatcaacgatagacctaacgcatcttttctcgctcgtcgccacgcacacatcggacagaaacgatttttacacatattatttttatacagtttcttttttgtctgctctttatccgttacaaacgctaaaaatgtgttacagtccttaatcagatccatctgtttttctcccacaaatttattaataaagttctgaaacacttgatttctcttctttttctcagtatacttttccatatcagatatataaaacaactggttctgttgcaaagttttaaataaagaataaaatcccttacggtatctatgatttaagctgggattcccaataataccttgatttcagtacagaccgaaaacccgaagagagtgccttcttttcgggttytcttatataatcctcgaatggcttccatgcctttaatcgtggtagaggcagtgcgtaaacttcgatagaatttattgcgtctctttactggacgatggtcttgttcaatcaaattattcaggtatttaatggtacgatgttctgtcccttgataaaagccgtattcttttagtttcttaaaggcacttgtaatagagggggctttatctgtgactacaaccttcggttcatcaaactgcttcactaaccgcttaagaaaagcataggctgcttgtgtgnccgtttttt

SEQ ID NO: 526 - DNA, 744 bp; double-stranded, linear
aagatttaaaagagtctgtcaacagtttagaagataagtttttaacagtggatgaattacgagcttttttaaactatgggatagtttatgaagagttacccatgtctgttctttttcatgttttgttttatactgggtgtcgtgtgagtgaagcgcttgctttacagcctcaagatatagattttgaacgaaatgaaattttgttttataaacagacagcagtaaaaggaaaaagtaaagattttcgaatagaaactacaaaaactgttagttctgcaagaagagtacccgtcacaccattagtaatggagaaattacaagaattaattgatgtattaaataaaacaaaaagaaatagtaattttgttgtagatgaaacttatttatttgtttatctcgatcctggaaagcgtggagttccttatcgtcgtgaatatgtaaacgatcatgttaaacgttgtgtagagcgatgtggaattaacaaagattttcacacccatttggctcgtcatactatggctagtttagtggcagagtattgcmgtkgggatgkttwaaaggatcgtttaggtcatacngacagtacaacctcaaaaatatatcgccatttaacatcaactgaaaagttaaagcctctgactgcttttaatnctttagaaggttaaaaagatggtgaaagtactggtattacaggattcttgaaaaacatttttttaataggttagtcaaagtgtagtcagaggc

SEQ ID NO: 527 - DNA, 7107 bp; double-stranded, linear
tgaagaagttatattggtagtttcnctctcngaaaaaaagttargcaaaacaatggataaagagtatcmagaatgctaatccttattagttaaagttctatctggaaaamgcaaaagtatttgagacacaacacgcagcctatagagattcaagtgatctgtgtaaagaattaaaataaaaaacgaacgttcatgttgaaattagaaattaaatgttttatcatactaatagtataaattatctgtaatggataattattttttatagattgaataaaatgttcgttcattttattgttttgttacttaaatagttttggaattttaaggaggagaaaaaatgttttttactggtaaagaaaggaatttgaaatttgctattaagaagaaacacggtggcggtggtgcagcatcagtaattatcggatgtattattttcggaagtattgcgtttggtgggacaacattancttacgctgatgaagtgcataatagtataaatcaggatatacaagattctggtagtacaattattggagaaaatgattcttctaccaaatcagctgagtataaaatgattcatgaaattgatggaactaaaattagtaacggtgaaaatagtnaagaaacaactacaagttcaggaactatactggctgaagaagcaatagaaagttcaaatcaaaaaaattcaaagacaagtgaagtcgaacaggatcttcataaagatgtatcaggatctgaatcagtaaaacaagtagaaacttctgattctataaaaaaatctgaagaatcagctgttaaaacattaaatctggatgattcacaagagaatactaattcaataactaccaaggcagaaaatgatgcgctatctacagttaatgatgaaaaagtattaaatgaaagtgatagtattatcaaatcaattccttcggaaacagagaatgtcgataataatagtaaaagtgataatagggacttagtagaaaactcagtggaaactactaaggaaataatgaaagaggctgataaaactgaaatagctaaaaggaatgacaatatctctgtattgaatgctggaactgaatcatttaatgatagtgataaaataagaagatctaaaagagataatgaatctcctgttccaagtttgagtattcaaatgccagtcacaaaagagatttacgaaaatgatagtactattaaaggaaagtctgaaccaggagtaacgataaaaatttataaaaatggtattgaactggggtctattaaagcagacgatgatggaaattttgaatatcctctagaatcacaagctatcaaaagtgataactactctttcgttgcggaaaaagatggagcgaaaagtatagagagctctgtaaatgtagtagaaaataaagaaatagtaggtaatcaacgagatgcgtatactccatatgggtttggtatatataatcgaggtttagttactactgatgatggaaagaaacattatacagttgatatggaggggaatttrgcatctgaagcgtactttgatcttgcaggcggaacaatgtactattcaattgatgaaaaatttgcaccatatgttgaaaaaatagttctagatggtaaaacaattatttctaaaaatccgtatgaattgcccaataaaaccaatatttggtcttctggtattcttagtacagataaaagaggaggattggttcgtgctgctttagtgggtcgtactaacggaacaatagatatttattttaaagatgatactcctcaagaagttctcaatagtgaaatacctttccaagtttgggctagatttaaagagaaaaaagagggagtaaaaaatgatctaatttctgattttgatctaaatattttacttcaaaacaataaattaatattaagtaaagatacctttttcaaagatgaagatattgtcaataataatggtcctaaaattagttctaattttaactataccaataatactattgatattaattatggagtaaatactggtaattatggcttaacgatagggaaacgtagtccttataacttgcatattaatacagggaaagaattaagtgatttagttgatacgataaagattgacaataaaaattatgagttcgaaaaacttcctgatggttcgttagtgattaaagatatatacaaaaagggaattttaggtggagcattacttaaccgccaagagattacaatcagtttaggattaatagcgaaaaaaaatctgggcgatctcattgatttcaaacaagaattattaaaacttgatgtatctattagagataatacaacctttaagctagtaaaaggagaagctacagaagctatccgtaaaatagattcctcattcgatacatttaaacaggaattaacgaaatggattgaaaaaagagatagtaatccacaggaacctataactattaattctggagacaatacttctatagtggatcctaaagagatggttgaatttgcagtaaaaaatccaaccacagaaaatattaataaagcacgtagtttggtttctaaaatgtggctttgggacaaaaacaaatataatccagttcttaatgctgctgaagaagtaaacagatatctttcaactacgttaaatggttcatcaaatgatgatggcttgatattaaataatactcatgcggcaactttcgttaaattaattgatacggataaagatgggatacttgatagatacgaagcaaacatgggaattggaaccaactacacaaatgctgattctgatggtgatggaaaaagtgacggatttgaaatttttaatgatactgatcctttggtgagtccgtacgattggtttgataaaaatggagaaaaaataaaaatagtaacaaccgatactgatacgataagtggaagaataggaaataacaactatgatactgaaaatgtctaccctagaactgttcaattaataaaggttactgataacggagaaaatctgatttctgaaattagttcttctgaagatagaaaagggacttttgaatttactggattgagtggtaaattaagcaagggagatagactcgttgttaaaattattactaatgaagtacaaagagaaattgatcgacaaagaaatgttgttcaagttggttatgataatccagaggtatctgaagaagtaattgttcagggcgcacaagtaacagtctcttttgactttaattataatcaaactgatcctgactttgaccgtcaaccagttactcaagtagtagaattagaaaaaggttcaaggcttttaaatagttattttactccagaacgaaaaggctataaatttattggatggaatactgataaacttggagtaggacaaactgtcaatgatggttctagttttaatgaagatataacggtatttgctcaatgggaaaaagaacctaacctagctggagaagtacatgctccacaaggtcctattgaagaaggtaaaagtattgttctaaataatgtagtacagtccaataaatcagggtctgtaattgtaactggagaacttccaaaagggctctttgggttatctataaatgaaacaggtaatctaattggtactccacttatcaatgactggattgatggagaaaatagtcgggaagtaaagattccagttacaattagtaatggtgacgaaaaggttatggtggaagttccattaacgatcctgcatgatactcgagcggcagacgcagtaaaagcagcagaagacgcaggcaaagctggagcagataagaaagccgaagtggaaaccgacggtttagtgactccagaggaaaaagcggcagtggatggcttgaatgacacgactaccgcgaagaaagaagacgcaagcaagttagtggatgccttgccagaaggaccagtaaaagatagcttgaaagatcgcttagataaagtgacaacctctgaagtaacagtgaatgatgcagatagcaatggcaaagcggacgatgtagatttagctgaaaaagcagcggcagacgcagtaaaagcagcagaagacgcaggyaaagctggagcagataagaaagccgaagtggaaaccgacggtttagtgactccagaggaaaaagcggcagtggatggcttgaatgacacgactaccgcgaagaaagaagacgcaagcaagttagtggatgccttgccagaaggaccagtaaaagatagcttgaaagatcgcttagataaagtgacaacctctgaagtaacagtgaatgatgcagatagcaatggcaaagcggacgatgtagatttagctgaaaaagcagcggcagacgcagtaaaagcagcagaagacgcaggcaaagctggagcagataagaaagccgaagtggaaaccgacggtttagtgactccagaggaaaaagcggcagtggatggcttgaatgacacgactaccgcgaagaaagaagacgcaagcaagttagtggatgccttgccagaaggaccagtaaaagatagcttgaaagatcgcttagataaagtgacaacctctgaagtaacagtgaatgatgcagatagcaatggcaaagcggacgatgtagatttagctgaaaaagcagcggcagacgcagtaaaagcagcagaagacgcaggtaaagctggagcagataagaaagccgaagtggaaaccgacggtttagtgactccagaggaaaaagcggcagtggatggcttgttagaaataaaacagtcttcatttatgccgtttgaaaatttattttcgactacaaatgattactcacagtttcctaaaactggtgaaaaatctgattctattttaaccatttatggaggtttattattcttaagtagtataggattattaggaataaaaaaaagaaaaaataatacgaattaagtttgtttgtattcttctttaagaaaggataggtgtataaattttatcaataaaaagctgactatttgtcaaatagagttgatagaatgataataaaagatcatctaaggtaggatttctcttttctactttagatgactttttgtttaaatatcagataaattttgattggacctgtagttgaatatagatctgtcgtagttacagaaggtaaatcgcatacttttcaattctagaggggaagtcttgttgagtattagctattaagcatcatagcccagttttgaattgcctaaccacttcgcttgtaattctttcatgcgtaaacaaagtagttttaggagtacattctcattagttaagttgagtagcattatctaatgcaaaaaggtttggcttttagctcataataatctttactaagtctcctcctttcttcgagtattatttcatttgtgtataaattgcatctttttcttcttctagtttcatgattaacaactaaaaatttttttagaaggacacaagataatacatttatgctgtaatagataaagaggataattatgtttaatcaaaaggaagagaagcagttcaaatatgcaatcaaaaagaaaaagggggcggtagagcatttttttgtattatcggagtagtattgtaagaaaactaaagattaaaaatagcaaacggarattatttccaktttcttatttttgcaaaaaatgaatgttcatgtgtatgaaagtaaccaataaatttatcttttcycgaaggaagtttatttttaataatttgagagggtgattatattgtgttttgaaaataaagggtatttttttgaaatctcagacattgctgaatttgttaaagtagaaagaaggaagcaacgcggctcagctacattaaatacttatgactatattttgattaatattgtaaaacaattgtgtaagcagcaaaaaaaattgatttacttaataaactcaaagaatttcaagactatattaagcaatttaattgaagtggatgccaaaatttctgattatctttttttcttgattaattgtagatttgaaactgataaagaagtaatagagtgtgtagaaagtgtagaaaaagatgctcttagagactactattgtgggttaaatttcagcgataacataaataactataaattaatagttcatacaactaaatattaattttttttagaaccatgttaaaggactatgtgatatttacaattccatctcgtatgtgctaaccttttatcgttaaagctatttcgtttatgtgtagaaacgtgagtttttgtttcgtacgttacacgaacgaaaatgattaaagtcaataatgaaaatgggacgagaatgggacaatactcagaaaaaaatctgattattgccccatttttttgatttcaaagtacacaaaaagcactcattcctgtaagattaaagtgacgaaacccaatcagaaaggaagcgagtgctttatttttaaaattataccatcaatcaaacaactttaccattagatatggaacaatatattcctgaaacagatgtcgcttttgcggtcaatgatttagtcgaagccatgccacaaacactttttcttaaattagaagaacaactaggatgactggcctaccaccctaaaataatgttaaaaattattctatgtgcttacacgcagcgtgttttttcagatcgtaaaattggatttctattagatgacagctatcgtatgcgttggctagcaaaccacgaacaagtcagttaccggaccatcaatcgcttccaaagtcaggaaacaactgctcaccttttagcagaagcctttgtcttattccgctgtcaattaatcaccaatcaggtaattgacaatgaagcgctatatattgatggcacaaaaatcgaagcggatgccaataaattcagttttgtctggcgcaaagcaacaaatcagtatgaagcttctttggataaacaatcaaacgaattctatcaaaccctttataaagaagaaatcttgccttctttaaaagaagaaaaccaaagtgatagattgacaagcaactaattggaagaaatcgtgcatcacttggagacagaattagtggcgacagaagaacaactacaaaatgagaaaaggataga

SEQ ID NO: 528 - DNA, 1533 bp; double-stranded, linear
tgaatggatttggcaatatgctaaaaaaaataagaataagttactgctagctgttatttttgtcgttattaacgctattttaattgttattattccattgttatctggcagaattgtagaccaagtaatcaatcaggggaaaactgaagagcttgtcccaattcttgggattatgattggagtgaccgttattcggacagttgttcgttatagttatcaagtcttgtttgaatcggttggacaatctgcgttatttgacttaagaaaagatatgtatgtcaaacttcaagaattagattttgatttctttaatcatacacgtgttggcgacattatggcgcgaatgacaggggatacagacgctatccgccattttgtwtcttgggtcacttataacctcttagaatgtatttnatggktcatcgcagccgtgattgtgatggggacgatcaattggcaattgatgctagcattaattttaattacacctttgatttttctgttaacacaaaaaatgtcgaaggaatcgcatccggtattttttgagatccgggaaagtttttctcggctaaattcgatggtcgaagaaaatattggtggaaatcgggtggttaaagctttttctcaagaaccttatgaaattgaaaagtttaacaagcacaatgaagactataaaaaatggaatatggcttctgcagatgtctcaaaaaaatatttaccgtggttagacggttttgcaggtagtttaaatgttattgccttagttcttggtggcctctttgtaattcaaggtcggatgacaattggtgatttagtggcctttaacggttttctctggatgttgaacatgccgatgcgaatgagtggctggttgatcaatgatgtgcaacgctttacggcatcgtccattaaaattcgtcagttattagcaacgaaaccgaagattcccattgctcgggaaaaagaagcagaaccaatccaaggctatgtgacgtttgatcacgtgtcctttcatttttcagatgatccagaaacccccattttatcggatgtttcattttcagcaaaacctggtgaaacaattggtattttaggggaaactggttcaggcaaaaccactttagttaacttaatcgctcggttctatgatccaacaaaaggcactgtttatattgatggaaaagatgctaaaagctattctgttcgtaaattgcgagaaaatatctccatggttatgcaagatgtctttcttttttccaatacaatagaagataacattgcttttggtaacacattggctaacttggaacaagtgcaaatgatggctgaaattgctgatgctcatagctttatttccagaatgcccgaaggttatgcaacaattgttggtgaacgcggcgttggcctatctggtggccaaaaacagcggatttcactggcccgtgccttaaccaaagatccagctattttaattttagatgacacaacttccgctgttgatatggaaacagaatcaaaaattcaaaaagaact

SEQ ID NO: 529 - DNA, 895 bp; double-stranded, linear
ttctaggcggcgtacccttttccggctaaaaacggtccggaaactcttggaaaccccttggttttaacttgggtcggaaatacttgggtcntagtttcctccaaaccgtcaatcccctggttcaaaattggatttaaataacacatccatacggagttttttcttctttttgcccaataaggaatgaactctttttgggaacgcaacgaccttcgttaaggtttcttctaacaagccgaaatcttgtgcagcgcgtgcttttagccaatctgtatgtgcttggtttaatactttaacatattcttgcatacgttcagctggaacatttttattcaaagcatattcttcttttactttttcaaaaaccagtttccctaattcagataattcttcagggcgtgtctcaaaataggccaatgcttcttgaataactgggccaatacttcgttcaaaatataatccggttaaatacccttctacttctcctcgaaaaggactacttttttctggcatcccagttgatgaatcccagtctaataatgtcaaggcattttttagtaattgaatttctttcacttcttgtaaaaatacagcttccttcatttttttacaccagctttcttagtcttcccgtggttttcttggtggacgtgttccccagtattggaataaatctgttcgtaaggctccgttgtaaagcttccgttttttagtagcttkggcaccataatattcttcaaaagcaagatcactcgtcagtatatacttgctccaagtagttaacggacggaaaacatggnccattctttatacaacggggaacacttcctcttctcctaaacgctcaccataagcgggtagctaccatacaccatatcctctcggtggaaaactt

SEQ ID NO: 530 - DNA, 532 bp; double-stranded, linear
tatgaattttgnataaaaatggtgccatgtacaagaatgcttggacaaacagcgataaatattcatattatagtacatcagatggctcattagcggttggacatcaacaaattggtgaaaataaatatattttcgataaaaatggtgcactatataaaaatatgtgggtagatttagacggaaatcgttactacagtaaagaagatggtgctctcgctattggagaacaaatcattgatggaatcacttacatgtttgatgaaagtgggaaactagttaataattaatttttgagaattagaaaatttattttagaatagagatgtaaatctgttgcaaagtttaagaagatattcggattgagatagataacacagcratraaaacataccaagattatgaattaatctcggtatgtttttattttttaaaaccaaaacaaacgtttttgtgtggtataaaccatatcaatacttcgtttgcctaaaatctcgccatctgcgtgaatggtttgtggaatcgtcgaaacaat

SEQ ID NO: 531 - DNA, 1129 bp; double-stranded, linear
agtatccagtttaatgctttgtcaatcgaaatacaagaaagtggnacagccgtttgacgaatgtcccacttttctgttttactattaacaggtttgtctcaatgtttgtgtaaaatgcttggatggtgttataaaagattcctgcgaacataaagattaaccaactaaaccgccatcccctaaaacaaaactmataaatagatagagtgccacaactaagggccaataaatggatgcaataattgcaccgacaggatttcccacagaaccttcctctgtttttgtttgcttaggggcatactcaggatgaccaacatgttctgaataaaaataagtttcattcaacaatttattaaaacttcctttaattactccaccaaatataaacaagaagacaccaaccgatactaaaaagaagagccaactaatccccatcgttccattataatattgtccgcccatcatttgatgcatggaacggcgcatcatcagatgaaggccactactaaagacaacaactgggattaaacccaaaatacaaaaaactacgcccgctgccatacaaaaaataaatgatcgttgaaaactttgttctctttgtgcaacttctttttttaacttaatcggaatcaatcgttgccccagctgtttgtccattgcaacaaaccgattaccagcaacaataaataatggaacgccgattgccacacctatgaaaagacaaactaaaccaagaccgttagaaagaacaccacgcataccaaccagcaagccaacacccaccatgattgcaacaacaccaagaccaatttgaatcgcacctttacgttggacagctaaatagtcaagtccttcctccactgraatttctggcaaaccgttcattgaatcgtttggttcatccacttgtttattttctaaattcaattcttccattaattcatcaatagtaccaaattcagarataattgtaccarttgcktcattttccgattttccttggctgagcaagtcttcataacgatcctcagcatttgctaatragtccgmctttaattgttttgtttcagatgtttcaacaacgcctgaaaataagctatcaataaattcttctataattttcattttc

SEQ ID NO: 532 - DNA, 1283 bp; double-stranded, linear
aacccccgataattactctttactcgcaattaagcgaaaaattgatcgttcatttttacctgatcatatttcttccgtcttattagatacagagacgtttggtagcaagttagccttattattgcttaacaaacgcaaagaaaaaacagccttgattaatgaggctgaaaaattggtgctagatcacaaaaatacattaggcatgtctagtgttaatccacatagcaaaatgattgtagtgggtagtttaaacgttgataattatctgtattcaacaaatttaccacataacggcaaaacaaattttttgtctagctatgctaaattccccggcggaaaaggattaaatcaagctgttggcttaaccaaactgggccatcaggccaccttaattggttgtttaggctcagacacagatgcgaattacttatataaagaattagaaaaataccacgttacgacagatggtatcacacgtattcaagatactgagactggtcaagcttatatttatgttgagacaagcggcgactccatgatttcaatcttacctggtgcaaacacagcgcttacgcctaaaaaaatcgcacagcaaaaacacctatttatggatgccagtttttgtctcattcaaacagaaattcctttgtctgctgtagagaaagcttgtgaaatcgcccaacattcaggggtaccgattattttaaaaccagctgctattcatcatattccagtgaatatactagaaaaggttgattttttcattcccaatgaagatgaattattggaacttcaaccagatactggtacattagaagagaaagcggcgtacttcttagaaatgggcgtaaaaaatgtcattgttactttaggaaaaaaaggcgtgttattaaaaacaccccaagtgtgccactatttccctgcaacagaaaatatagctgtggatagcactggtgccagtgacagctttatcagcgcgctcgcctcctatctttcgaaaggttatccgactgaagcagccattcaaatagcaattcaggctgcaggattttcagtttctaaagaaggggtgattgattctttagttgatcacgtcactttggaaaattatttgataaaaaaagaacccgctctttttgctcatcgtaacacctgtatcgactgacacaggngttttcctgctgaatatcttgtnattttctcatnaaccaatgagaattgtgctttttattacaattttattaggcgaactattataataaaagagaagttataactaaggg

SEQ ID NO: 533 - DNA, 6470 bp; double-stranded, linear
ttttcgggattcctagaaaagcttggactgtaactttaacttggtattaacgcgggacttctttttattcactgaaatccacgtcgtttcaattcttgggttacccttctatagccataatgttgatgttttttacgaatcgcttgaatttcttcttcaatgatttgtgttgaagctgttctgtcgaggcgtttttgccagtacatgtaagtagattttggaaaccttagggtttccaaaatatcttttaatcgaaagtgtcttcggagactgtgaatgattcgtgcgattcgttcattttttgttcgtcctctaaacgcagtctcctcaattcttttaaataggcattctcaatttttaacattctattttctttttctartttytctacttgagatmgttcacttrtartgkttkgggttcatttcgtttcttyttagacatggtaggtggacaccctttctatttagagagtcccttacgctagacttccgatacgttctaagccaattcgcaatcaatgatggattgttcgtttttaaaagattagcaacttcttaataggacaactttatcgcatctagcttaaattgaacagaataattcttacttttttgactacgaagtagtcctttttcaccaagtctttatagacattaatccatttgtttatttgagaacaaatttaagtttaaattcaaaattttattttgccatacaaaaaaactcaaaagttagatttctaggtctaactttgggggagcactacagaactgtaattctcttaagcgcatttaatatagattcaatcttttgtaaaaatccctatattttgtttcttgaaaaatttaatcattttaatgaactagggatgatcgatttcgagaacataaaaaacatattaatacaggattgctttatccttgatacgttttaagagtactccggtttgttgtatcttttattactccaaacgatgatcccgcaaacgatagcccactccaatctcagttatcaaatattctggtttcaatgtattactttcgatctttttacgaatattagacatattcacccgcaatgtctgcgagtcattgctgtaggggccccatacttttgtcatcaaggtttgatacgcaactacctttcccaactgacgaaacatcagcgctaaaattcgatattcgttttttgtaagatggatttcttgtccctttttataaactaactgtttttcgaaatcaattttcaagtctttgttttccacgacagttagtgattccgtttgaacgttttgatggcgcaaagctgtacgaatcctcgcaagtaattcattcgttccaaatggtttagttacataatcatccgcacctaaatccaacgctttaactttctcctcttcattatttctagcagaaataatgatgatgggcaaatgcattcgcttgcgaaggatttttaacaaatcaatcccatcaatgtctggtaatcctaagtctaacaaaactaaatcaaacgatgttgtttgaaaagcagtcaatgcctccattccagtactagcaatcgttaactgatagcgttcctgtcccaaaacaacttccataaaatccgtaatatttggatcatcttcaatcaataaaatggattgcttcataattcttcccctcacttcaaataaattcgaaccaatgttttgcccctacctatcgtcatttccattttaccattgtgcgcatggacgattgtttttacaatactcaatccgattcctaaaccattttttgagtcaaccggtacttcatttgtgccggacaagtttgattggatcttttgaaattgttttaatggaatttcgccgtgattttcaatttcaaaaactgtttgttctttttcctgatagacgtttagtttgactggtagatcattttctccatgacgaaacgcattttctatcagattaaacaacgcttgttcaatcaaaatggggtccgcttgaataaaaatgacctcttctggcaggtgaatatccacttggccgtctggatagaccttcctcaaatgcttataaacagcctcgatgacctcttctactggttcagcagttttattaaccttcatagtatccatgttgattcgcgtgatggataaaagattttcaaccatccgaatcagccattgtgactcttcttgaatatcctttaataattttcgctgtgtctcttcttttaaatcatttccaatgcctaatgtttcagcaatccctgagataacagttaatggtgttctcagatcatgagatacggctcgtaataaattgctgcggactttttcccgttcattttctaactcaacttgctctttctcatctttcaattctgtttgttccaagatgaccgcaatttgagtcagcaccaattttaagtaattgagctgatcattttccaaatcaagatctgcatttcgttcaatgcctaataccgccaacgtcttcctgcctgcagcaatcggcaaatagaatcctttagctccatttagtgtgtctgtaccattcccagcttctttttggttctttgctgcccaaaaggctacagctgcttcgtcttcattatttaatattgattttttttcgttgatacaatgaacactctctgtcttcacttgacgatcaaaaataatcacttctcgttccaataatcttgataaataagtggcagaaatatcaagaatttgttttcgactttccactaaaacatatcgtttgttcaattcgtacaaaatttccatttggtgctcttttttcatagaagtatctgcttgtttctttaatcgaatcattaaattactgctcatcagggcaacaactagcatgagcaataaagtaaaaggatatccctgtttatatactgtcagagaatataatggttcgacaaaaaaccagttaaaagacaaaacacttaaaatagaggataatgagctccaaaaataaccggatgtcgttcgagcgactaataatacgaatgaaatataaataagcatcagattttgatcgccaacgtggatatattgcatcaattccgtcacgaccgtcgctagaaaaacaccaccaattgcaatcactaaatcttttccgccaccctcaatgactttacgagtcttaaaaaataaagaccgcttttcttcattgaaaggaattaaatgaagttccgtatctttcaatcgttttaacaagcgatcatcaaacgcttcaataaagattttttcataccacggctgccttagatttttccccataataatatcagtaacacccgtcatttttgcgaactcgacaatcgtctcaaaactatcatcctcttcaatactaataacctccgcacctaatttatcggctaaaggaatgttcgttggtgtattttcttgcgtacgaacttgaatcactgtccaatcgacaactagaccttgcgctaaacgtgctgtccagcgaatacatttttcggtcatttttggaaaggcatcgttcaccaccgtcaataatttactttgtatcccaattgtctttccactaattcgattaatatgatccgacgctcgctgaattgctaatccacgtaattggtccaatttttgtggaataaaaaaatttttcaaggcacgtttcgcgttttcattcgcatatatttttccttgttcaagtcgttcgatcagctcatcgggctccacatcaatcactcttattgtcgcttgccgtagaaaagtgtccggcaccgtttccttgacctcaattccggtaacttcttcaacgatatcattcaaactttcgatatgttgaacattgaccgtagtaaaaacatcgattcctgcattcaacagttcatcaatatcctggtatcgtttacgatttcgagaaccttccgcattggaatgagccagttcatcaatcaacacgatttcgggcttctgttgaatgatttgatcaatatccggctctgttaaaaccatttgtttataaaaaatattcttaggaggaatttgcggtaatccttctaataatcgattggtatctggacgatcatgaggttcgatatagccgacaacaacatgttttcccatcatcaataattcatgagcctctgtcaacataccgtagnttttcccaacaccagccgcaaatccaaaaaatatccgcaatcgacctcggcgtccatcgccagattgcatttcttctgttgtctgcatcaacagttctcctctctttgtatgcacaacaattccctaaccatttttggttagagaattgttctatattatattcctagtttatctaatgctaggtttaactgcaaaacattgacataaaatcggtctgaaaaccaatctttttggctatgtttatcgatgagtttacgaattgattgttgagacaagccacgttctttagaaattcgggcaacttgaaaatgagctgctgccaaactaatatccggatccacaccactagcagatgctgtcacgagatcattcggaacttttttctctgctggatttttttccaattctgcaacggtgcgcttctcaactaattgcttttgctccgccgaaacaggtgatagctgactaacttcctcactacgtcctgaaaaatattttgcctgttcaaaagtttgcccaatcaactttgaaccaacaacttgattattcactgaaaccttactgccgttagcctgatctgaaaagaacaattgaccaatgccagtaactgcaacggtatatagcccaccaaaaacgatcaggctaaaaatcaaaaaacgcaaactgcctagaatactttttttcattgtttctactcctttataaaatgatcagcgagagaatcagatctataatcttgataaaaataaatggtgcaataattcccccaagtccataaatcagcagattatgactcaaaatttgactggccggtttttcttgatacctcacaccttttaatgctagtggaatcaaggccacgataacgactgcattataaatgacagcggatagaatcgcagtcagtggactacctaatcccataatattcaatcgatccagttgcggataaatactgtaaaatagtactggaatcaccgcaaaatacttagcgatatcatttgcgatactaaacgtagttaacgcgccgcgagtcatcaacaattgtttcccaatctgtacgacttgcagcaattttgttggactggaatccaaatcaatcatgttccccgcttccttcgcggcttgtgttcctgtattcatcgccatcgcaacgtcggcttgcgctaatgctggtgcatcgtttgtcccatcaccagtcattgcaactaagtgacccttttcttgatactcgcgaatcagattcattttattttctggggtagcttctgccaagaaatcatctactccagcttccgctgctatcgctgccgctgttaaggggttatccccagtgatcatgatggtcttgatacccatcttacgcatatcagcaaatttttcctttacaccattcttaacgatgtctttcaaatagacgacacccatcacacgattattttttataactactagaggtgttccacctgctcgagcgattttatcaacaatcttgtcacattcagatggatagtcctctcctttagattgtacatattttttcatggtgtctgcggcacctttgcgaatcacgtcaccgcgataatcaattccgctcatgcgtgttttggcactgaaatcgataaatttaacctctgattgctggaattctctttcccgcaagttgaaacgttcttttgctaaaatcacgatacttcgaccttctgctgtctcatcagctaaagaagataattgcgccgcatccgctaactgttcttcactaacaccatggactggcaaaaaatcgcttgctcgtcgatttcccaatgttatggttcctgttttgtcgagtaaaagaacatccacgtcaccagctgcttcgatcgcacgaccactcatggcaatgacgttttccttcgtcaagcggctcatacctgcaatcccgatcgaagagattaaggccccaatcgtcgttggcgccagacagattagtaaagcaatcacaataaccagtgataaagcttctcctttaccagataactgactgctgaaatcagtaaatgggactaaagtaattgatacagttaagaaaataatggtcaaagtaatcaagaaaatctgcaaaccaatctcattcggagtcttttttcgttgagttccctctaccatggcaatcattttatctaagaaggattgaccgttttccgaggtaacacgaatcactaaataatcggaaacgacggttgttccgccagtaaccgcactgcgatccccaccagattcacgaattactggcgctgattcgccagtaatggcactttcatctactgatgcagccccct

SEQ ID NO: 534 - DNA, 1685 bp; double-stranded, linear
caattaatttggagatttcagccatagtaatgcctttttgaaataattggataatggtcgtttctaatgaatcattggttcgcttatatgctggtagtgtttgttgagaaagttcgccattccgatctctaggaatagttaaattcaactcgccatattctgttttaaatgtacgtgaataattcccgttacgggaatttcctgaattgaatccatttcaatcatatttttcgtaatctaaaaaagcagttagctctgcttgtagaagtgaattaatcgctcgctctaaatgatcctgaaataattcatctaaatcccctttattgagtagtgtttgcataatttctatagtaaatttagtcatgagaaagtcctcctataaaatttctgtgtggtaactttaattttacagaatggacttttttttctaccctaaatttctatttacacaaaatattttacgctatcttttattttaaaatatgggatattatgataaactaactatggatgatatttgaaaaaaccatactgtatgtttgatttaatttttatttttaagctcatatcgtaagaatgggacttgtagtctcacttctttatggaggtgataattatgaacgttggttttattggagccggcaaggtaggttgttcattcgggaagtatttccaggaacataaaatacaagtaacaggattttatagtaaaagcgaagactcgtcattagcagcttcgaattttacatctagtaaacaatatttaaacttaagagaattagtagatgaaaatgatactattttcattacgactcctgatggtcaaattcaggaggtatggcaagaaattaaaaattatcaaatcaaaaacaaattaatctgccattgcagtggtgcaatatcttcagatatcttttcaaatatacaggactatggtgcttatggctattctgtccatcctatgttttcaatatcagataaatataattcatacaaaaaattaaaaaaatcttttataacaattgaaggcgatgaaaaatatgcaaagtttttatgtgatttcttcaaaaagttaggtaatagtactgtaattgtatctaaggagaataaatctctttatcatgccgcatcagtagtatctagtaaccttgtgctaggacttattaatacaagcgttacatatctaattcaatgtggatttactgaaaaaatggcaattgaagctttatatccattaattgaatttaatattagaaatataaaagaaaaaggaattatagaaagtttgacaggaccagttgaacgttgtgatatttcaacaattaaaggtcactgtgaagttttatcagatgaagacagagctttatatatgctattatcaaaaaatgtattagagatagctatgtkraaaaatattaatagagattatagtgaattagaaaagtatttaggagagagttaggagagagatagatgaaaaatacagcagttacatttaaagaatctaaattaagaaatgaaaaattaacaatgcttacagcttatgactattcaacagcaaaaataattgatgaagctgggataaatggaatattagtaggagattctcttggtatggtatgtccaggacatgaaggatancactttcagtaaccatgggaagcctgattccaccatactagagc

SEQ ID NO: 535 - DNA, 1566 bp; double-stranded, linear
gggaaaataaakgyccccttatccctttkggtattccsccagtgataaacycctgttaagatagtggctatataaaaaaggcmgrtacttaagaagagtatattcatgattycccycctagtttaaatgaaagtcatgaatgattgtaccaagattttttagagaagttaagattgaatagaaaagtaaatacgataaaatttttatagactgttacgttgaaatgttcttcagagactatttcttccaataccgcctactagataggtggttttaatcattattttcggaggttgtgttttggccaaaaagtaaagatttaatggatgtaggttcatttgtgagcccatctagatagaacgtttcaggactttagtgaggcatgaaacgattcgatgcaagcattatctgaaggtgtcccttttcgggacctactcatggtaatgcctttttttatttggttctggtagtcaaaagaagtataaacagagccctgatcactatgcaatagacaatccgttgtttgaggcaattgatcaaatgtatccagaacaaaatccgtatcttgcttatcaccgatggtataggcgataaattcaccattgtataaatccataattgaagacaaatacaattgctttttaccaaaaggcagataagtaatatctgttaccaatttctttaaaggagcgtctgaagaaaattacttatttagcttgttctcgacaaccgtgtaaggttgtcccactttactgcgtttcttcattttcacgcgacaattctaatgatatttccgcataatcttttgtacggtgtttttatttactttgtattcctgattaatcaacgcataatctttcgatagccatatcgaaacttatgctggaagcaaagtcgacgaacagcttcttcaagaggcgttaactttcccaagtcttttcgatgagtccaacgataataagtagctcgcgaaatgccgaaaagttgacacaatgcagtaatgggtaattttcctttcattcttttaactaattctacaaatacttctggctccacgttctttccaattctttgaactttttaagcacctcaatgtgcatttttaaatagttattttcatttttaagctgctgttcatttgatagattttctggaccttttccataagcatatttttttcaacgggttgaatcagacgatgatgattctcgccattacgataccccaacgccaccatgtgtcaatttgtgttttgtttttaattcctaattcttccataatcgtttttacaggaatattctcttttttcatctgtatagccatttctttgatgtaaataggataagatactcaatttctcattgaaaaagcacctcctagttaaattcattttaacgtgaattcaacaagaggtgcttttyttgtctcagtttattgggtcagttccctatttgtttggtcacttttattttagcaaaggtgttcttatttttatacaaaaaataatccagatgtcaatyaatcttattaatggtatcggaatttcaagcnctgttgnacaaantt

SEQ ID NO: 536 - DNA, 1378 bp; double-stranded, linear
caataaaggtttcgcttaacgtcccaaataaaactgataaaatmagaatcatccagaagattaaataagccagaaaaataaacggttagataatactttgtccattgtgtttttcctgattgatcttcctgatccatatccataatattttttagaatccaatcgattagcatatcgccctcctcttcaagtattgcactaaattataacgaatatagcgactaatagatagataattccttaattagtcattatccctccctaagtaagaaatagtgccttgacctgagtataatatcttcttgagactggtacttccgttccgtctctcatagttaaaagatgcgttttataatttaattttgacgcatattttttattgatgatgattgattgatggactctaatcaaatctggatgcagttgttcaatttttgataacgttccataaaattctcttttaaaatttttaccaaccattgacacacgatgatcgtattccgtttgaaagaaataaatatcattaatatccatttttatagaagacgcttttaagttaatgataatatattcactttttgtctttatattttctttttgttgaatatatgcatcgacacatgtttcgacctctttttggaaatctagaaaatccacgttcttttgaataaattgaagagctgaaaccatatatttgtaggaagttaaaactaattctgtgtgagtagaaataaatacaatcagactttcactgtctgtttttctgatttctttagcaacctcaaatcctgcctggatatgattgttcatttgaatatctaggaaaaagatatttagttgggcgtcctggtgtgccacttgtaataattcatctgaacgtgaaaataaatggattgtttcattataaatatttcttgaatgtaggatatttgttaacaatacttctaacgcttttgcttgaataatttggtcttctaatatataaatagccatttgttcactcatccctttctcaagaagatataaaattacacaacaaaagacaaatgattataatgttcaatcaatttatacaccaataaaagagataaaaaattgattgtctgttagtatattcacataaatttagtatagcgatttcagtagtttcctgcaaacaaaaacataaaataacaaaggatcaagaaagagtactttggactattcatctttttctaacgaatcatgaggactattgtctcttcgttgatgaaaaacaaagaatcaaccgccaaactgttcttgtcattttatacatgacaaaatcaattcattggtcgattctggttaatttaatttgttagtcacacatgggatcattgtactaattttttactta

SEQ ID NO: 537 - DNA, 7696 bp; double-stranded, linear
taaaatatctaaaccacgacgacctctcacccgttttaaactgtctccagaatcagcaatgtattgtaattcatataaaacaaagttagggatgagcaaaacaccttctaaaaagcctgttttagcgatatcgtagattctgccatcaatgatgacactggtgtctaaaattttgtatttatggaagttgtcttccactttacgttccaacatttgtccttcggtgtcttccgtatttgctttcttttggcgaggtgtaaaaacttttttccactcctcaatccgtgttgttcccattcggaaacctaagtaacccagaataatcataactagaattggcagtaaactattcacgacaggaatttgtaagttgtacattggaatggaaataatgacaccaattgttaaaccaatgatggcaccaatacttccaaataataaataggttaaactcatttcatttaaagctgcttcgatttttttgacagcggaaacaatatactttgctaaccctaaagataaaataaagaaaataattgcaccgattaatccgttcgtaaagttattgtttaaccaactgttattgccttgcttagccatttcccaagccattgggaaaagagaaattcctaaacttgcaccagcaatgatcatcagcaacgtgatgattcgtttttgcatatagccatcctcctcgtttatttaataaagacgtctagtgttgtggggcgtacaaaaatcatacgccaccaaaaacctaaacggattatttctactttcattatttaaaaacttttcttaacgtttcaccaattgttgaaacgccaataatttcaatcccttcaggcgcttcccagccaccaaggttatttttagggacatagacttttgtaaagcctagtttttgcgcttcacgcactcgttgttcaatactattcacgcggcggatttcaccagttaaaccaatctcaccaatgaaacattccgaagatgaggttcctttttctttatagctagaagcaatactgattgctaacgctaaatcaatagctggttcattaattttgactccaccagccgcttttagatacgcatcctggttttgtaacaaaaggcctgcccgtttttctaaaaccgccatgattaaagaaacgcgattaaagtccaacccggtggtcgttcgcttggcattgccaaacatcgttggggtaactaacgcttggatttccaccaaaatagggcgtgaaccttccattgctaccacaattgaagatccggtggctccttctaaacgttcttctaaaaagacctgagaaggattcataacttcaaccaatccatgtgtctgcatttcaaaaataccaatctcattcgttgagccaaaccgatttttgacagcccgtaagattctaaaggtgtgatgcttatctccttcaaaataaagaaccgtgtctaccatatgttccaacatccgtggccctgcgatagacccttccttcgttacgtgtccgacaataaaaatggcaatcccattcgtttttgccagtttcaataattcggcagttgtttctcggacttgactgacactaccagcaacgctggtaacatctggctgcgtcattgtttgaatcgagtcaataatgacatagtctggttctaatttttcaatggctcgtgatatttcgtgcatatctgtttctgcgtataagtaaaatgtctcgttgacggtgcctaangcntccgctcgtaatttaatttgctcagcactttcttcaccagaaacatataaaaccgtaccacctgtggctgctaattgttgcgatacttgtaagagcaatgttgacttacctattccgggatcgccaccgattaaaactaacgaacctggaacaacgccaccacctaaaacccgattcagctccactaattcagtttttacacgaggctcttttttaggtatgacttcagatagccgttgtggttgtgtctttttaccagtcaaacttactctagcacgacgatcagaagtatcttgaataacctcttccaccatcgaattccattgtccgcaattaggacagcggccgagatattttggagacacatacccacagctttgacattcaaattgaacttttgctttttttgccatgtagaatctccttatctgttgtttattttaacatttattaaatggtttgaataacgttgcctactgaaaaaatgggctttatttttgtccagacgaaccaaaaccgcccgttctttctgcctcgacttggtcatcatccgctaataaaaacggcttaaaaatcccttggccaattcgttcacctttttcaatgacaacatcttcatatccaaagtttaaaaattggaacatgatatgtccttcgttattctcgttattataataatcactgtcaatgactccgacaccattcgctaaaagtaggaatcgttttagcgggttcgaagaacgacttaccaattctaaatattcagaatcaggcatatacgccttaattcctgttttaactaaaattggtttgggattttctccagcttgttgtaacttccaaagacttggtacaacgaccgtttcggctgcttgaaaatcataccccgcggcaccttttgttgctcgttgtgggacactcaagccctcttcttgatacttagaaataatctcaaaaccacgttgtttcatattcattctcccctactgtctaaactactcctattttaccataatctctgatactctggttgtttttagtaagtttctcatttctaaaagcccagttaatctagactacgcaaaaaagaggagaatttttgtttattttccttcttttagtctatcatcttctcttaaaataaacagaccaaatcccaaaaagtcccaagattccctcaaaaagttcacactttcattaaactttctttactattcattatttagcactttctagtagccgctgattttgttataatgagtgtcaaattttactgtaaaaagaaacgaggcacttatgagaaacaaactccaacaggccaaacgaattgtgatcaaagtcggaaccagttctctgatttatcccaatggcaatattaacttaaaagcaattgatcaattagcctttactttgagtgatttaagcaaccaaggcaaagaaattattttagtttcttctggcgcaattggtgtcggactgaataaattaaatctatctgtacgcccaacgacaattcccgaacaacaggcagtcgctgcagtcggccaagcagaattaatgaacatttataatcagcggttttcaacctatagccaacaaatggcacaagttttattaactcgtgatgttattgaatatcctgaaagtcgcaataatgttaccaatacttttgaacaactgttaaaaatgaatattattcctatcgtcaatgaaaatgatactgtcgcaattgaagaattggatcacttaaccaagttcggggataacgatcaattgtctgccattgtctgccaaattgttcaagctgacttgttagttatgttatcagatattgatggtttcttttcagacaaccctactgtcaacaaagaagccacgttattttctgaaatcaatgaaattaatgaagacttgttccaattagccggtggtaagggaagccgctttggcactggtgggatgtctagtaaattaaaagctgctgaacgtgtgttagctaatcaacaggcgatgattttagcaaacggaaagcagccaaaaatcatttttgaaattttagaaggaaaagatatcggtacgttatttattaaaggagggcatgaaagtgactgatttaaagcaactagggcaacaagctaaagaagcctcttatacgctaggcttgatggatactcgtcaaaaaaatactttgttaaacaaaatggccgcagccattgaagccaatgcaccccgcattttacaagcaaatgcattagatttagagcaagccgctacccacggaatttctgaaacaatgcaagaccgcttacgtttaacagaagaacggatcacagcgatggctgagggcatacgccaagtcgctactttacccgatccaattggggaagtagataaaatgtggcgcaatgaagcgggactgttaattgggcaacaacgcgtgcctttaggtgttattggaatcatttatgaatcgcggccaaacgtgacaacagatgccgctagcctttgtttcaaatcgggaaatgctgttattcttcgaggcggaaaagaagcgtttcactccaatcagatattggtgacaattttacaagaagcgctaatccaagaagccgtttctccccatctcattcaatttgttgatgatacttctagagaaacagcccaacaacttatgcgcttaaatgactacttggatgtcctcattccgcgtggcggcgccaacttaatcaaaactgttttgacaacagccactgttcctgttattgaaacgggcacgggcaattgtcatatttacgtggacaaagacgcccagttaacaatggcaactgaaattattgtcaatgctaaatgtcaacgtccttctgtctgtaacgccgccgaaacgttattaattcatcaagaggtggctgaagcctttttaccaacaattgaaaaagccttgaaggagtttcacgtggaacttcgggcagatgaacgtgcgttagcaatttttgaagaagccattccagcgactgaacaagattgggaaacggaatttctcgactttatcttagcagtgaaagtcgttgattctttggacgaagccatccagcatattaatcgctacaatacaaaacattctgaaagtattattagtgataattactttgccacacaacaatttttacaacaagtggatgcagccgctgtttatgcgaatgcttcaactcgtttcacggacggttttgaatttggatttggcgccgaaatcggcattagtacgcaaaaattacatgcccgtggacctatgggtctagcagagcttacttcgacaaaatatgttatttatggaaatgggcaagcacgttcttagaaagaaaaacccttgatttaaaaatcaagggtttttctttctcctctctaatgtgcatttttacacatgagattgttcacagttccacaatctattcttgatattttttttgaatcctcattatactttctacatatgcttgtttcacttggactggatctaaaattgtcacttcttcaccaaagcccataaaatagttggctaaaaattgtgtttctgttggatgaatctgtccaactaaaaaacactgcgtgggcgtttcttccaactgaatattgtcaaagcgatgtttataaaaaaattctttgcctttttctgtaatgattgctttaaatggaatcgtacgtgccgtcgtttgttgatggcgatacgattctttcaattcttcagtcgtaaaatccagtgtttggtttaattgctgaatagcctccataaaatcacagcggtaagtacgccaagcctttttagtcacatcatagcctgaacaataccaatacccttctaaaatagttaaccgggttggtaagatttttttcgttgttgcttcatatctggtatagttaaactgaattacttgttgcgccaaaatacaatgaaacagctgctctaaattgcctggtgcttctacttgttcaattccttcgtaatagacgaccttactcatttgactgattttaaattgggttggttcatctaaagaatgcaataatttttgcttaatttgctgataggaatgaccaaacggtgactctgcgactaatttcagtaattgtaacgaaaaaaagattgctaacacttcattttcgttaaaataaatcggcggcaacaacggtttgtttaaaactcgatagccaccataacgaccattctccacatatagcggcacgcctaaattttccaaagcttcaatatcccgcaaagctgtgcttttagaaatcccaaaagttttcattaactgatttaaattaaactgaggatgggttctcaagaaaaaaagttcctgatttaaacgttctgattttttcatttttccctccatcggtgtcactttttgacaccttttattgttatgcttatcttatcaatcttaggaggttcaaacaatgaaaaacacacaatttgccctttttatggtcttaaacggacgagcaacggaagccttgacgttttaccaagaagcctttgctggtgatattctttttaaaattactaatcaagaatttaaagagcgcttaaatccttctttgaccattcccgctggcgaagaacactggctttctcactcgattttacaaatggacacttttcaattacaactagctgataatcctttgtttgcaggaatgaataccacgcccacagaacaattgaccctcagcttaaccgtcaatagccgtcactctgccaaaacaatttttgaaaaactcacgtgccatcccgaatcctgtattatccaagaaccaattgaaaatgaatttgcaacattttatgcgattgtgaaagatccttttggtttagtcactcaaattactcatgaaaaacaagcagatcctaccaagaaaggaagttagccgaagaatgcgaacctatgaatcaaaagaagccttgattgaggccattcaaatagcttcacaaaaatatttagctgaatttgcagaaattcctgaaacacttaaagatcaccgaattgaaacagtagctaaaacaccttcagagaacttagcctatcaattaggttggctcaacttgctgctttcttgggaagaacaagaacaacgtggtctgaccgttcaaacgccagctgaaggctataaatggaatcaactgggcgcgctctatcaatcattttatcaaacctatggacaaatgagtttagaaagtcagctgattgcgttgcaagacaccttagaaaaattacttcattggattgactcgctttccgaagacgaattatttttacctcaacaacgggcttgggcgaccaccaaagcacaatggcctctttggaaatggattcacattaatagcgttgccccttttactagtttccgaacgcaaattcgcaaatggaaaaaagcttgtctttaaaaagttatccacattttttcaaaaaaagcttgacaagtatttttaaattctccacagaaaactttgtggatgaaatttcttattttttccaaaaaacttttccacaatgcttatttgttcgacattaaatctttgtaaattctagaaaaaagaagatgaaaacgttgttttaataacgttttcatcttctttcaactttagggattcctttacttttagcaaacaggacttctgaacttacgtctgttttttttagcaactcgaaaacttatccttgtggataaaccgagataaaaagcttttttgtggttttcaacagagttatgcacaaagttatccacagggcgttttcagcaatttttcggagaatattcgttgtttaatctggtgatttagcatttgaatgtcaatcccttactactaattcttcttcactccacccttaggatcctaataaaattttaaagtkttctctattggtacatcarataaagagtatgrkaaactataggtactt

SEQ ID NO: 538 - DNA, 987 bp; double-stranded, linear
ctcctatacaaacataggctattgctcagaaatgtcgagagacaccaatgagtagaacaagactggtcgaggagaaggcttttctcaaaatagctaagagtgatctttacgttgtatagtgctaaagctcaacgttcatgttgatgtatctttttagtctctagtcaatcagttaagtaagtacttttatttaaaattaagagaggagtgaaagtatgactactatgttagcaatcattggaactgttgcaatcatcacagttcaagttattgaatataatatgacagaaattcatattcctactgcaggaacatttaatgacgatgatgcagaacccccacattcttctgtaacccttgtatttattcgcactatacytatcactctctcacttaactttccatctcatttttttgagawggkttttttatgkatycgrgaaaatwatraacmaaaaagacygttaaaycaatgatttaacagtctttagtataccggcggccggggtcgaaccggcactcccgtgaaggaactggattttgagtccagcgcgtctgccaattccgccacgccggcaagatattttggaaggcggtaaccggatttgaaccggtgatgaaggttttgcagacctctgccttaccacttggctataccgccatattccatttttgttacmaaaaaactggggtagctggattcgaaccaacgcatgacggagtcaaagtccgttgccttaccgcttggctataccccaataaaattacaaagggcgaccgatgggaatcgaacccacgaatgccagagccacaatctggtgtgttaaccacttcaccacgatcgccgtaatcttaaaaagtgtatctattaaataattaaatggcaggggcagcaggaattgaacccacaccaacggttttggagaccgttgttctacctttaaactatgcccctaaaatggangaaagtggattcgaaccactgaa

SEQ ID NO: 539 - DNA, 759 bp; double-stranded, linear
cgcacctcacgatcgtaagcaacaaatttttccgtaaatagcaagggattttccaagcctaacgctttagcaaaggtaaacaagcttgtttcttttaaagaagctgcttgaattaatttttcatctgttaaaacagcaactggagtcgcatctgctagtaaacgtccatcacaaactactaacgcacgtgttgtatattccaacattaagtgcatatcgtgagtgatcattaaaatagtcacacctaagcggttcaattcttctaaaaatgtcatcatttctgtataatgtttaaaatcttgcccagctgttggttcatctaaaattaataattcaggttctaaaactaagattgatgcaatagttacccgttttttctgcccaaaactcaacgcagaaatcggccagttccggaagggatacagcccacaaatatgtaaaatattcgtcacacgttcctcaatttctgcttgtggcacatctcgtaaaactaatcctaaagctacttcttcaaaaatcatttttttagaaatcatttgattgggattttgcatcacataaccaattttatctgcacgttctttgattgaataattggaaaaatcctgtccttcccataaaatcttgccagattgaggcgtgatgaacccgcaaattattttagaaagtgtagacttcccggcaccattttttcctacaatgctgatcatttctccawgatgaatagttacwgagaagtcatctaacactttttcaccg

SEQ ID NO: 540 - DNA, 1171 bp; double-stranded, linear
accgacgcctaaatccttttgcttcaaagtagactccattgccattcgcgcatgaagtttcgtattattttctttgctaagatgacctaaataaatgcgttttgttttatcacctaacacatccgccatcacaagagcaccatcatcattggataaatggcctttatctcctaaaatccgttgtttaagactccatggataaggtcctgctcgcaaaatttcaatttcatgattgctttcgactaaataagcatctgcattttcaatcgtaccacgaatatgatcgctacaataacctgtatccgttagaacaacaaaggaacgattattgcgatgaaaacgataaaattgaggcgcaatcgcatcatgtgagacaccaaaactttcaatgtccatatctcccaaggtcaaaactttgcccatttcaaaaatatgtttttgagcgacatcgactttgccaatcatgggatccatcgcttgccacgttttttcattggcatagacatctaacttatattttcgcgctaacacgccaacgccgtgaatgtgatcccgatgttcatgtgtaactaaaatcgcatctaaatcttctggtttgcgattgacttctgctaacagtgaagtgatttttttgccacttaaacccgcatctactaatactttcttttggttggtttcaataaaaagggaattgcctgtactgccactggcaagaacactgatattaaaagcaaactctgaatccatttaaaactcttcccttctacattacaacattaacgtgtttcattatacaacggaccttaatgtttttccacctttggcacagtattatttgtgatgatggtattacttacggcattcacctgttcaatttcaactgaatcttcaccagtagaaattcctacaaaccagactggaacgtatacatttttctcacgaattttataaattcttgaataggccaatttaatgaatgttattttggaattactaggaatccggttattcatatagagcgtgtctatcgcatcacgattggaatataaatccgttttgtctcgtaactcttcaatattttcaatgtgcgtttgcgaatatttactaatttgccataattcacctgacgaatctgctaaaatacttanttttgccgggtcgnncccgaaaa

SEQ ID NO: 541 - DNA, 4134 bp; double-stranded, linear
gcaatcattgtattgggatagaggttaagncctagggcatccccatctggaaatgctgtatggtcatggncattcctaaccaggattagganggagggatcgcaattyccatctcgttccatttaattttgcttaaggattgtgccatcaaaacaccaacaataatcaacgctggtgctgtaacttgcgaagtgacaactgctaacaaaggagaaaatagcaaactgaaaataaataaaatcccggttgtaatagctgtgattcctgaacgaccacccacagcaatccccgcagatgattcgacatatgcgccaactggcgatgtccctaatagagaaccagctaacatcgctgttgaatcagcggctaaagctttccccacacgcggcattttattgtccttcataaaacctgcttgattggctaagcccaccaacgtaccagccgtatcaaagaatgttactaataggaacgttaaaaccacgacccacatttgaatcgtattgatatctttcacatgtcctaacgccactaaaaatgttggttctaaacttggccgcttgaaataatcttatcaggcattggaataacgcctgtcgctaaaccaacaatcgttgaaatcgccatcccaataaaaataccacccggtactcgacgaactaacaaaattgcagttacgactaagccgacaatggtaacccacgttgaaccaacattcaaaggtcctaagccaacgagtgtcgcatcattagccacaattaagccaccttggcttaaaccaagaaaagcaataaacaacccgatcccacctgaaatggcaaatttcaagtctgcaggaattgcatcaataattagctcgcgtaatttaaaaattgtaattaaaataaatatcaatgaagccacaaaaacgcccgctaatgtcgtttgccaaggaatccccataccaacagagactgaataagcaaagaatgcattaattcctaaagctggtgctgtcgcaatcggatatttcgccaacacacccattaaaatacaacctaaggcactcgctaaagcggtggcagtaaaaacagcgccttcgtccatgccagaagcaccaagtacggttggattaacgaacaaaatatacgccattgagataaacgtggtgaaaccagctaacatttctcgtttcatattcgtattcaattgttcaagttcaaaatatgaacttattttttctttcatgttccgtcctcctaaaatctaaatattttacaatgttcgtaaaatattcaatttattaatgaaacaacgtgcttccttgagtggatattattaagcacgaatagccccattttacttgatacaataggaatttgcaacaaaacataattagttaaatacacatagttttgatcaaaagcacagaccaaagcacagaccttttttaatccatcacgccaatagttacatattacgtttactgttttttaaacccaacgggaaaagaatagttatacctgatatacctatactgataaaaaaataaatgaggtaacttgtccagtcagcggtacccccatctatataacctgaaattgaaaaatatgaaaacaaaactatcacactgactaaccactgatatcttaaccttaattttaattttattgtcattacgtaatacatcaaatacacgcctatcagtaccaaccatacgatgtaactactgatagaataatgaccatcgaataagcccacactagattaatcaaaataatcaatattattggtagtaatacttgacataaagtgttagatcgatagatgcatactattttatcgataatttttttcattgtttgctctccaaaagtttatttttaatataagctaataaagttcctaattcaattactacccatgctgttaacagaatagtccagaataaacttcgtacatagaataaagctataaatgtaaatattaatattgccaactgactgattatcactaataaatcttttttttgggaaaatttataagctaaaagactgcacactatgccaattactgggataaaacgaatataactaggaaccccttccattggtacagtaaacaatagaattatagaataccaaagttcatcaggaaccttcgacgataatgcccttattcttccccaattcataagttaatccccctttttcattctcttatacttgtcttctatacgcttatcctgttttttcccgcctgcatgaaaagctagaataatcattgcctctgtaataacaaactcccatactgaccaatgaaaaataactgtcatccctagaattactaacacagctgatgctagaatagcatcttttgtgccaaaatctatccctataggtaacataaaaaacctccaatctcactttttttatcctaaagacattgccaaaataaataatatccaaggaactaaaaaactaaaagcacttaaaagattagcgacaagcaatataagttttaaccctaagtgctttatgtacatactaggaatagctcctatcaagccaattggtaacgtccacaacaaatcaaaggcaccatgatagggattgtagaaaaagaggtacttaatccatacaagtatattcaaaagaacgaataggacactcgcaacaactgctgatcgattatttagttctattttcatagttactgacctctttggtttttattttaattatatcagaaaagacttcactgataaaaatcttttcttcccctcaaacaaacgagctataataaagtaactagaaaaccagcaaaaataatttgtaataattttaaattattgtgcttttttatattttaggtataaaaaaggtagccgactatccgactaccttttaaacactattcaattacagtaacatttaccgcttttgttcgcccttcgtattctgcggtttcgtactccactgcttggccttcaagcaattttctaaagcctggcatacaaatacctgtttgatgtacaaaaatctctgatccatcttcggcaataataaagccatatcctcttttatgattaaaacttttaactgttccagttttcacttatacttcccccgtattatgatttaagttgcccacgatcaaatttcatagctctttctactagattaggagctgaaacatagcttgaaatgcctattacacttctgttatggcgagtaactccgatgattttatttccttcgtctactacctcacgattatagattgcattagcttttactttaactgattttataaacatagccttttcatttaattgtttaagcaaaagtgctatttcttgttccacgggctctagttgtttttcaattgcttgtctgtattgagagtcaatatctcctactttattaggaaaatgagtaaaacaagattgctgtagctcctcgcgttctttcttcatttgtgttagtaaatgattattttcwgttaaaagcctgtttatttcaggttttctcttaagactatctaccgtaaaagttttcgtattttctagcgtttctaactctttctctaagacagatttttcctgttctaaatcattaatcactttatctactccgctaaaaatttcttttagctcggaaataagctcaacttttcccggaatatcgtagttaatttctatcattttaatagcaccccttatttatcatatttagacatgatttttttaaatggatcaggtttatcttctttcttatcctctttatctgattccgtagaatcacctaagctttctttaatcaactcttctaatgcttccgaagctttatcaatgtcaaattgcccttcttcatctacaaattcctctaaaacttttttaatatcttccgctgtcatatttcttacctctttcataattttttatatattttggtgaaatttcaccgaaataaacatattctgcttgatacatgatattgcctaattgaaaagcgtcatttactttgtccttgtttgtacataagtgtgtatggaattgcngnatccaataaactagcagccgtgtgatctggttcgaatattagcaatggcagcattccgataacacaatattacttattaacggcacnccat

SEQ ID NO: 542 - DNA, 1004 bp; double-stranded, linear
aatttttttagttcgtctgtggcgttctaagtgcagcaaataatcgtcttgcagttttagaaggtctgaatatacctgatccatagtcttgctggccgacaaagagagagaataaataaatgaaataggaagtgtttcaattttyttgttgcgagtaatccaagaagagacagttccttgagagaaagcatgtaattcacaaaattcttctacagtaatccctagttgcttgataatgtatgcgttgatagggtgtggatatacaaaggtttttctmggcatggtgggtaagcttcctttcttaggttattaatgcgtttgcagtaatattgtactaaaaaacatgcaataagggaagggcgtacctgcttcttttttgttgaccttctttaataatgtgttatactaataatgcggaagacataagttcgatatgamcagcacaakagmccaaacctgtgacgaggtttgggctatttttttcgtcttgcggatagacgtgtgggctaggacaacttgcatggttatctgctaatcatctaaccaatggtcaactagtaagattactagacccacaaaaagtggggcaataaccaaagacataagttcgtacataaacagcacccccaatcggaggcaagttgccgaaataattataacataaattcgaatatacctatacagtagtaaaccttcagtgttttacttcaacttttagctctctttttagtacgtatactcgtttacataacgaacatttgtacttacctgaatcacttgacactctgctcgcaagacacccacacgcacactgtacgtatgcaacgccacttattttattgtngtcyttaatcactgcaccctggtagttaaattycttcataaaattctccatcatcgtaataatctttcataaaagcatcgattgatycttgttcttcatctgataattctggaagtacgacgtctgcgaaaggattttccaatgtatctacagcagacca

SEQ ID NO: 543 - DNA, 2170 bp; double-stranded, linear
ccccttycaaataagctcgttcgtgctggtcgggccakgaatgccggtgtttactttgtcacgcaaaatagtgacgatttactggatgaacgcttgaagaataatatcggattgaaatttgcttttcgtagtaccgatattcatgaaatcaagaagactttggaattttttgggttggatcaagaagatgaaagtaatcaaaaacgcctackagatttggaaaacggccaatgcttgatgcaggatttgtatggtcgggtaggtgtggttcaggttcacccggtctttgaagaactcttccatgcctttgatactcgcccaccggttcaagagagaatggagtgaaggagatgaaaaggaaaattttacggattgtaggcattgttttgactagtctatttttcctcatcattcttttgagtttagttggaaaggtagcggaagcgactggattagtcgatgatacagtgaaagctggtaatctctattctcaatattctcttggtaactaccaactagatttttttgtagacaattcttgggactggctaccttggaactggggggatggtttaggaaaaagcgtgatgtatggtctctatgccatcacaaatttcatttggaccgtaagcttgtatttgtcgaatgccacgggttatgtggttcaagaagcttataaattggattttatttcagatacggcagaaagtatcgggaagaatattcaaactctagccgggattaacgaaaatggacttcagccatctggtttttattttggctttttgatgttaatgattttggttttaggcatttacgtagtctatacaggattacttaaacgggagactaccaaagcagtgcgagctgttattaattttgtagcgatttttctactttcgggttcctttatcgcctatgcccctaactacattacgaaaatcaatgactttagttcggatattagtgaatctgcattgagtcttggcactaagattgtcgtaccaaattctgaaagtcacggtaaagatagtgttgacttaattcgtgacagcttattctcaattcaagtccaacagccgtggctcttgttgcaatttgatgattccaatgtagaagaaattggcgaagagcgagttaataaaattctatccgtgagcccggatgaaaataaagggaaggatcgcgaggaggcggttaaagccgaaattgaagacaatgaaaatgcaaatttgagtataacaaagaccatgagccgattagggaccgtggtttttttagtattgtttaatattggaatttccttctttgtctttctattgacaggaataatgctattttcccaaattcttttcattatctttgcgatgtttctcccaattagtttcctgttgtccatgttaccgacctatgaaagtttgggaaagaaagcgattgttcgcttatttaacacgattatgatgcgagcgggagtgacattggtcatcacgacagcatttagtatctctacgatgtttttcaatatttcagcaacctatccgttctttatggtagcatttctacaaattgtaacctttgccgggatttatttcaaattaggcgacattatgagtatgttcaatctccaaagtaacgatagtcagtctatgagtaggcgtgtgatgcgaaaacctcaaatgttaatgaaccgtaaatttcgtcaactcaatcgaaatgttggccgagcgttggcttttgatggcggtgtagcagttgcaggtaaattagcaactgattctacaaaagaaaacagaggttcaaaaagcaaaagattatctaatcgaagaaaccaatcgatacaaagtaatcatgagcaaaatactgatccgaagaaacaagaaaagactactaatagtagaaccactcgattgaatcttatgggtaggaaagctggaaaggcaatggattcaaaatctatcgtgaaggacaaagtaaaacaagcaaaagaccatgtaattgatacgccaacaaatttgaaatataacctgcatagaggaattgaaaaggcgaaaaatgccccaggggaatttaaacgcgggcttgtgcaggagaaaaaagaacgagaagaacaaagaaaagctaatcaccaacaacggcagaaaagaatggatgaaaaacgccaagtgttagg

SEQ ID NO: 544 - DNA, 1141 bp; double-stranded, linear
caaagaatattggaggacaaaatgatcaatcaaccaaattcagttgatcaaccaatcctgacgaaccaagaaaaaatggtcaaaggctcagcttggatgacagctagtaatattatctcccgcatgttaggggcgatttacatcatcccctggtacgcttggatgggcgagcacggaaacgaagcgaacagtttgttttcaatggggtatacgatttatgccttattcctaatgatctctaccgccggaattccaggtgcgattgccaagcagacctcgcattataattcattgaacgaatataaawttagtcgacagctttttwatcgkgccttacaactaatgggtggcttaggtgtggkttttgctattgtgatgtatttggcatctccggcattagcagctttgtctggcggaggacctgaattagttccaacaatgcgtycattaagtttagccgttttagttttcccargcatgagtgtcattcgcggttatttccaaggaaatcaagaaatgatgccctttgctttatcacaaattgttgaacaagtagcacgagttttttacatgttattaactgcttttattatcatgaaagtctttgaaggtaattacgttacagcggtgacccaagccacttttgcggcatttattgggatgctcgcaagttttgcggttttaggttattacatgtacaaacaaaaaccattatttgattatttagaagaacacagcgccaatgaacatgaaattgctccaaaagagttattgattgaaacttttaaagaggcgattccttttatcgtagtcggctcaggagtgactgtctttaaacttgtcgatcagtttactttctcaaactttatgcgtttgtttacggattattcagatacccaattacgagagcttttcggtatttttaatgccaatccggacaaattaaccatgattgtcgtggctttagcgacttcgatttcggctactggattaccgttaattacagaagcggtcaccttaaaaaatcaccgtgaattagcgcgtttgattagtaataatttacmacyttttgtgkttgtaatgtgccagcaacggtcsgtatgatgttttagcgncaccactatacactggtttttacatg

SEQ ID NO: 545 - DNA, 965 bp; double-stranded, linear
ttagatatgcccttatcaagtcaggctctgtattttcatttagcgatgcgtgccgatgatgatggatttatcaataatcccaaaaaattgcagcgaatggtcggttgtggggaagacgatctaaaattgttgatggttanaaaatttattctagtatttgaaagtggtgtgatcgttatcaaacattggaaaattcataattatattcgcagtgatcgttacaaaccaaccttgtatcaagaagagaraaatcagattgttgaaaaaaatagcaaagcttatacgtttaaagcagaatcgtctgtcggtggtcaaccagctgactaccaacggttaccacaggaaagcatagtccagtctaagttaggtcagagtcaagggcagtagttcagaaaacgattgtttaaagatgatttatcattttatgaggaaaacggcttggtacactggcctcaaaaacaagccargattttaagtattggttgcaagattttatacaaaaaggggctagccaagaggaagcatgccaattaatcttgcatgctttaggaattgccgtcgatcgaaataaacggaattacggctatgtaaatgctattttgaaaagttgggagcaacaaaattatttatccgtacatgaagttctggtaaatgataaaaaacaagtgttggagcatgcgccgcaaatgacagaagaatatcaagagttaggtttttaaagaaaggaggaaatcagtatgcatgcgacagatcnaacttttccaatactattgagtcaattgttagaaaaagttgaagaccgttgtcctgaatgtggcagtgaacaatatgtttggccacaaaaaaataaagatggcacmgaacgttgtgccccaacttgttggtcgtgtgggtataaaatgctaaaaaaacatgaacaangagccaatcaacaacgttctcaagagagttttatggcacgtaac

SEQ ID NO: 546 - DNA, 716 bp; double-stranded, linear
gacaaatgctgctgccgcgaaaggatcgagagacccttagttggttgaacaggaataatcgtgaaggttattcataatgtagctgatacatgttatctacgccctatagtgctaaagmtcaacgatagagaatcttatttaaagatggtattttgggacgtactctattgttgagtaggtccttttttgtgtgtttggcaaaaaagcaattattcactggaagtataaataagaaaaagaaaggatgactgtcatggaagaccctggaagtgaacagagaaacaaaatacagtcaccaatgaaaggagaagattttagcgctcttttcggcaggtgaccacaaccttggaggaaaagaaaatgatgaacaaaaaaacaatggatatgagaaaagcaaccaaagatcaagaattacgtaaattggctttgctttctgaacgggaattaatgatggaattacggacatctgaaaaaggactctcgaatgaagatgccgaaaaaagattagaggaatttggaccaaacgaagtttctgcacaaaagccaaccccagcaattattttatttttaagtgcattcaaagatccgtttgtctatgtcttagccttattgatggtcgtttcaactttaacgaaagatttcgaagccgctatcgtgatgggcgtgatgattttagccagtgtcttgantgcttnatacaagagtatcgtnctcaa

SEQ ID NO: 547 - DNA, 963 bp; double-stranded, linear
tagacaattggtccccactacaactatccagttataacnaagagcgcccactcgaacctttttctgtaatacgcctaatgtcattaccatcatattgcctgttgctaactcaccaccaacaaaagtaagcgctatcaacccaactggaaataaagctccacccagaaagttgttaaacttccccmttctgtgggggcagttccagtgatacgaataaacgccaagtaacccagtgcaatacaaaaaccagccatgatgcctaaaatacagagtcgaacaaacgataatttccctttcatttctgccttatcacctaagcttgcaactatttcttcactactgaaaaaatccattacgattcctcctttttatcgataccactgagacaattcttcttttcgattgacatttttaagttgattctcttttgatagttgcaccgtttttacagatagacgctcaaattcttgccgaatctgatagttattttgcgcaagctgtttttgaaatgttggtaaacaagaacatcgataaaagccaaataatggttcttgacgaccttcaaagtcaaagattgttacttgattttgtccacgcttagaggctaactgatacacaagtttaggagaaaaagttggtatatcacaggcaattacaaacacttcagctttctgagtatagttcattgctgtcacaatcccacctaatggcccctttccaagatacatatcttgaatgattgtgcattttctaaacgccttaggaaatttttgactatcattcgttactaaaataacctcttcgaacagttccattaacttttcagctgtttgcaagatcacgtattgcccttgaattttcaataatgctttatcaaatcccatccgtgaacttttcccgccgcataacagcactgckgtacaatcagcaataattttcgccaccccttttaccataatntnn

SEQ ID NO: 548 - DNA, 2744 bp; double-stranded, linear
cacatcctctctaagttttcttctacatcgtcggaaagctcgttttcttctaattctatattttccatcaaacaaatagctgtttctatctcttcaatctcatctaatacgctctctataagcctgtgagggcaattaacctcttctttatacttgaatcgcctaatgagcaattgttgctctaaaggcttaagagtagcccaaaaccgctcaaaatgtttttgtcgaaataatgtgcgttcgattcgtttatctattagctctagctttaacaaaagtttttccacttctttatctggtcggaagccttttgtagtcattcctaactcatcaaacacaatatgcgttgccatattttggctgaaaaattcaatacgccttaatttttttattgaaagcaacttttgcaacactaacggaaatgagagatagttttttataacaatttcatcaaatggatccattgacaacgttcctctctttcctgaattgtcttttttaggctgccgaaagtgccgacttttttaggtgtctgatttgtcagattttaaacaaaaaagaggacacaagacctcactcaattaagagtaagctgtctcatatcctctggttcttcctagtaagatacatagcgctagaatagcaagatatacttatttaactgtctttattatagcacttttttcgcctaatagatagtttagactgctaattcttaggtaaaacatgcgatgtaattgtatcgtattttactaccttcccatcttttacaatcaacttaacttccccaaattttggtagttctaccacttccgtttttttactgttatcaatgtatactttatccatgttagcctcctgttaataaaaatcttttaaattctttagttttcttaatagtaaaaatagctgtgcacgttgttaagtagctctttagcactccttaagatgcataattgtgtttgttttgaaatattttaattatacagcgttagtaattgttagtattcatactttttcacacctaattaaggaaaaagtcaagtttagtcaagtttttatatagaataaaacgagatcttgtaaggktcttttttaggacggaagaagcggaagatttcatgccgttatttcttcttcaatctttttagtttcttcgataatcgccgtttttcaatctctttagcgttgttccctttagaagctctacggtctttagactgcacatttaatgcatgttttgtgcctgctggttttttctctctaatcatgactattattcctcctcataccaaatagaaatagttgtaactgacgtaacctcctcagaatctccgtagctttccccagtctgtttaatgtgtttgatttcaatatacgggttctcctctaaaaaatcgtttaattcacgctctaacttgttgatatttcctctttgaaaaattttaactttcataatcgctactctccttgtcttataatgtacaatttgtagtattttgtagtatttaaaatttgggttgactatcaagatacattataaactcatccgaacataacagaaggaaggtaaatttatcaaaaagatctacgtacaagctctcctgattctcagtaagattatcttttgctaaggcaaagtaaagccgaatcaatcgcgctaattctcctttaagctgttcgacactcgaaaaattttcatcttctaataaagactgtacaattactccttgcatgcctcctgcagcttcttctaaccaattagggtctttttccatttccgctaaaacgataggggaaaaatgagaaatatctccagtaaaatgacctcgtgtaaaagccagcatattggataaaaaacttcttgtaatttcttcatattcaaaattcggttctttttctgttgataatataagcataagatttcctcttttctttatctttttttgttttattcgtttggtaactaattctaaaaaaaactggttaccgcttaaagcattgggggagtaaggatagagccatttggtaactagttaccaattctttttactattcctcaaacttttattaaaactttatttacaaatttcaatagataaaattagtaactggttaccaaaacgctcctccctcactctcccaaggggtgggagtggtaaccgatttattttgaattggttaccatttttttataaatttctcttccctcttactctcccaagggatttggtcggttaccaatttatttttaaatcggtaatttaacttatcagctttaaatcgtttcttactaaagattggtaaggcattccattttctggtggttcttcatagctgaaaaaatctcccaatgcttttattttttctatctcattcacactatattttatttttttatttatccaactatcccctaataaatatgtgaactgtttagaaaatttaattttactcaatggtttaaaattattttccttgcaaaactctttatattgagagtaaaccatataaaaagggattttgtttattcctaaaggcttgaatactgtttctctaaaatcaactagagggtcattttcttgtttatattcttctaaaagttttttggaaacatcaggtactataaaacgttcaaaatccatgtttaccgctttatgcaaaacgtattcgagcacctcttttcggttgatatactcttcttttattctccaatcatctttagcaccttcaaatgaagcatt

SEQ ID NO: 549 - DNA, 2165 bp; double-stranded, linear
attnatctttttcnggctcggaaccaatagacccattttgccattctaaactgatctaaaacgtaataaaacagtttgatccatctggattgatttcaacccatttaggtagtttgtaagaacgtttagccaaatttcaatacttctttaattggcaagccctacgttcctatagataaactttttgcttttaattgtacattaccattcgccatcacgtaaggatcaaaatataagtaaaaaggaatgtcatgccctaacacctgaaatgttccatttaataaagcatcattttctaaataaaatttatatttgatctccgaacctttttgaaagtcggctaaataaaagtcaatcagtttgttcacttgttgtttttttgactgaatggtgacgactggctcgccttctttttcaacaattgctggtattttctttaaatctggttcgcgaacttgtgttgctcgaaatgtcacgaaagctacactaccaatgattaaacccactagaacaagaaaagcgattttccagggatttcgtttaagattggttggttgtgtctttttaattgatttacttgtttttggcttttcttcattcattttattcactaccttctgatttggttatccattctttctctgtcttgaccatttcatcccggacagctccggccataatttggtagccaagattattcggatggaagcgatcttcttcatataacaaattgtttaaatcctctttgctagcactacttcctgtagtttctgagtcaccaccagttacgccaacttcatcgccacgacctttatagagtaaatcattgataggaatgaaataggctcgtttttgctcttgaaccatttcttcggttgcytgattccaattatcaacgatttcttgcatttctgtaatttcggaaaagtttaagtagaagggattgtaaattcctaagacataaataggggccttctcgttgtactctcggatttcttcaagtagtcgtcttactcggcgttgataggctttttgtggacgattgaacgagctgactttcaagtcgaaaatattactactaattactttcattaagtcatttccaccaaccgttagcgtaatcacgtccgcagaggcaaggcccttttgaatttcaggtttctctttgattcgttttaaaatttgatcactacgatccccatttttcccaaaattgtctgtttgaacaccgttcaagttgtagtgttcttttaaatcatctgccacaataggaacaaaacctccactattcgtcaaatcgccaattccttcagttaaagaatcaccgatagctgtataatgaatgacttctttttgatttttttgagcagttgtggccactttctcttgctttaatagtggctttgctttggggatggccacacttaacaatgtaaaaacacctagcgcaatgaggataggtgttaagacggtcagcaaaatatgctgtgtttgttttttcatcttcgtcacttccttttaaataaaccaacaagaaattttccttttcttgttagaaagaggttgcgtctactcgtttaagagtgagacccaacctcgttatttcttagtctgtatagtacataatagcaaaggcatttttcctgtatgtgttgcaatgactggattcgtatgtaatacgggaatatccatgtctttaaagattgcttgtaatccttctttgaatccatttgctagttctagcccatccgcatgagaaatgccaatttgtcgaacatttggaatcttacttaattctgatttcaattcgtcaaaccatttattaaacgttttaacgcctcggcctttcgctacaggaatcaattccgtattttcaaagtccatgacaactttcatattaaaaatgtttgataataatcctgttgtacggctgattcgtccacctttaaccaaattatccaatgttgaaatgccaatgtataatttagtattttgtttgacgcgttcaatttcagctaaaatttctggaacacncgctcccgcttgtgccaattttgctgcttgaatgacttggaaagacaaaccttggtctgtaaaatcgctatcaatcaccgttactttacttgatgataagttgctagcttgacgggccgcttcaanccgtt

SEQ ID NO: 550 - DNA, 9797 bp; double-stranded, linear
ggtgaagcaacccttctgttgctccaccaactcctaactagaccgtttctcgatgccttagattattttgattctttttcgcctgcttctaagtagctgacatcattgactttatccaaagtatattcgccatttttgtaatgaattgttgtgacactagcattcttcaaaccgccttctgggactttaaaatcatcaaataaagttgctaacaacgctgaaatactcaagccatgagagaccactaaaacattgccattcccagaattggctgattctgtggcaacaattttatctaagccttttttcaaacgtttagtaattgtagcatagtcttctgcaggccagttattcttgctttcctcgcgctgttgatccagtttagctacactattggcaaaggattcaggagtcatgtttttcataaattcttctaaggaaacaccttgatcatcagcaatatcctgccacattgtcttatttaaatccccttcatagctaccaaaattaaattcacgtaaatctgggtcacgcacgacttcaaggtctttgcctgctttattttgatctaaaataagttgagcagtttgcaaggcgcggccactatcactactatatgcattttgaaaggcaacatctttcagtccaatcccagttgctgtcacaactttttcaccttctggtgttaggaccgcatctgaccatccttgtacgcggtccgtcgtatttaacatggtttttccgtggcgcacaatgtaaagagttagttcttcaggttttgtctctttttcttttgtcgttgcttgctgatttttaccacaaccaaccattactaaaatggccagaaaaagcatccccacaatcgtcaatcgttttttcattttttatttcccctcatcttctactctgttgttaagttttcaccattactagcgataacttgtttgtaccaattaaatgattttttcttagttcgtttcaaggttccctgaccttggtcatccatgtctacatagataaagccgtaacgttttttcatttcgccagtccctgctgaaactaagtcaatacaaccccatggcgtataaccaattaagttaaccccgtcttcttctattgcggttctcatggcttcaatatgttgtttaaaataatcaatgcggtaatcgtcgacaatcgagccatcctcttgcaatgtatccaccgcgccaaacccgttttcaaccacaaacaatggcatattgtaacgatctgacaactgacacaatgaaattcttaaccctaaaggatcgacagcccagccccattcagattcttgcaaataaggatttttaaccgcaggcatttggttgcctccgacatattttacttcttcgggataagcagtcgaaacagtcgacatataataactaaacccgatataatcaactgttcctttttgaataatcgctaaatcatctgactccatttgaattgtcattccttcacgctcaaattctttgagcttatgcgctggataatagcccttagcctggacatccatataaaattcttgctctcggttaaattgaacagctgctatcacgtcctcaggtttgcaggacaaaggataacttggaatataagccaccatcataccaatttggaaatctggattgatggaatgtcctaattcaactgctttcgcacttgctacaaatagatgatgcgctgcttgatatttactttgtttatcattattgtgaatcccaatttgcgtccaacttcttaaaaaattaatttcattaaaagtcatccaatacttcactttatcctgataacgtgtaaaaatggtttcgcaaaagaaaacaaagaaatcaatcacttcacgatttttccaaccatcatattcatcggccaaatacatcggaatatcaaaatggttaatcgtcacaacgggctcaattccatggcgcagcaaagcatcaaaaactttatcataaaaggctaagccttcttcattaatctcttttgttccatttgggcaaatccggctccaggcgatagacagccgaaaacatttgaaacccatttctgcaaataaggcgatatcttcttcgtaatgatggtaaaagtccgtcgctacatgactagggtagtataattcttcatcgatatagccaatcgctccttcgggtaatgcttgatcgcgcgtacacgaagctttttggccttctttagttaaatacgtaatccgtcgcggttctgtttgactaccaccagtaattgcatctaatgtactcagacctttgcctcctgaaaggtagccaccttcatattggttagcagctgttgcgccgccccataaaaaattttctggaaatcccataaaatccctctttccctctgtttttaggcatcacaaagaaaccatcaagggaattgacgctggcagaagagtccttgttttttctaccaacgtcaaacgccctttaatagttgctaattttattaattacttaaatcttcaccatttgttgcgattacttttttgtaccaatcaaacgatttcttcttgcttcgttttaacgtaccatttccttcgttatcgcgatccacatagataaagccatagcgttttttcatttcacctgttccagctgatactaaatcaatacagccccaagtcgtatagcctaacaagtcgacaccatcttgttcaacagcatctttcatcgcttgaatatgcgccgccaaataatcgatacgataatcatcgactacatcaccattttcgtctggtgtgtctaccgctcctaagccattttcaacaatgaatagtggtttttgataacgatcatataagtcattcatcgtaattctcaaaccaagcggatcaatttgccaaccccattcactggcttttaaataaggatttttcacagaggcaaagatgttaccagctgtttgttcattaatttctggatctgttgatgtgacacgagaagaataataagagaacgaaatgaagtccaccgtatgttcttttaaaagttcttcgtcgccttcttccatttcaatttgaatacctttacgggccatttcttttaaagcatacgcagggtattccccacgtgattggacatcaataaagaaataattttcacgatctgcttgtcgagcagcgaaaacatcttctggtttacaagtataagcgtagttggaaccagccgctaacatacaacctacttggttttcaggatctacctcatgagcaatttttgtcgcaattgcacttgctagtagttcatgatgggccgcttggtatttcacttgttctttgttttcgccttcttcaaagtatagacctgctcccataaatggtgcatgtaaaatcatattaatttcgttaaatgttaaccaatatttgactaatcctttatatcggttgaaaattacacggcaaagattttcatagaaacctactaacttacgactacgccaagcgccatattcttccactaagtgcattgggcagtcaaagtgtgtaatcgttactagtggctcaatcccatatttatgacattctttgaataagtcttcatagaacttcaagccttcttcattcggctctgtttcatctcccattggaaaaattcgactccaagcaatggataaacggtatgttttaaaacccatttcaccaaacaaggcgatatcttctttatagcgatgatacatatcaatcgcctcttgtgcaggatagaaatgttcctcatcaaagttaaacattttcttttcaccagtgattactggaaaacgatctggaccagttggcgctaaatcgacgtttgccaaaccacgtccgccttcgttatagccaccttcacattgattggctgctgttgcgccaccccataaaaagtcttttctaaatgccataaattctcttcctccacatctttttatattaaagcggtcagcaaatcatcacttgttgaaacttcattactgccgacttccaaaatatctaaataatccgctgtattcgtcacaacgattggaatttgtgtactaaacccagcttttttaattccttctaaatcaaaggttactaatgtttgaccttttttcacgcggtcaccttgttttacaaaagcttcaaagccttcgccttctaattgaactgtatcaatcccaatatgaatcaataattctgtgccgttatctgaaatcaaacctaatgcatgttttgttgggaatagtgtgacaatcgttccatcaaagggtgcaaccactttaccttccgttggttcaatcacgaccccatttcctaatgctccatttgcaaaagcaggatcctctgcattttttaaagataacactcgtcctttgactggacttgtaatattttcttttttaatcgttgttttatcaataatcacttcttcttcctcaactgtattgtctttccagaagaagaatgttagaccaaaaccaacgaccgctgcaatggcaattgcaataaaggactggatcatcccacttgcatcatcaccattgataaagtttagcacaccaaaaattcctaaaccacccattgtataagctgtcacattgttgatcatcaaatataaaccaccgacagcgccaccaatcattgaataaataaatggccatttttttggtaaagtgattccataaattgctggctctgttacaccaaaaataccagagataattgctggcggacacaaagcttttaactttttatctttcaatttgaagaacatcgctaaaacaaccgctgtttgcgcaaaactagctgcaaatgatcccgttaatacttggcttgaaccttcttgtgtcacttgcataatagctaatggcacaacgctccaatgtaaaccaaaaataactaagacttgccagaagaaaccaagaatcaaaccatacaaagctggtgagaaactcattaatgctgtaaagccagcgcttaataaatctgttagcatgctaacgattggcccaattactaagaaaccaattggtaaggcaatcaacaagacgaaaaacggtactaagaacgtttgaacaacttctggaataatacgtttaaacactttttgaacttgtgccgcaaaagcaataatgaagatgattggtacgacactacttgtatagttcgcaccgacccaaggaatccccataaatgtattataggcaggtaaaccgaataaattatacggtgctgcggctccggcacccgctgttgtttcaaaggccgtttgtaatgcacttccttgaatcgttgggtaacataaagctgcgccaatcacgatccctaccattggatgcaaccggaattttttagctgctgtataacctaaaataactggcataaagtagaaaattgcatcgccaatcccatttaacatggtataagtccctgacgtagccgtatagagctttaagaaaaccaataaggcatttaaccctttgaccatcccagccgctgctaacgcccctaaaaagggttggaaacaaccacttaaaatatctattaagcgatcaaataaattcccactggaagcttcttcttcacgttctcctgacaagcctgcaatactaactacttcttcgtaaacggctggaacatggttcccaataacgacttggtattgtccaccgcttttcataacagttaccacaccgtccatattttttaagacatcatcattcgcttgactctcatcttttaatttgaagcgaagacgtgtgatacaatgtgtcaaactattaatattctcttgcccaccgacattttttacaattttttctgctagttcatgatattttcccatctttttttcctccaaaaatttattttcatttgaaggtttagccaactgaatgtcactatccaaagtggtgcgtttattgttccgttgtttgtacaattcgtgcaatgtgaatcgttaggtacaagcgttcttcatttgaaacttgatagtcatagttctcatttaaatacaagctgatcttttccacgcaacgataggcgttgagatatttctttttgattaccgcatacagttcttcatcatcattttcgacaacttcacgttggtgtaataagcgataacagaaaaattttaatgtgtgctaaatcgataaaagtagacagagtcttcatcaaaacttaccttaaaatagtatttgacgatatttgtaatctcttgcatcaactttgtcaattcgtaaatattaccgacttcttcctccatctccgcatttaccaagtgcaatgcgataaaacctgcctcatccgttgacaattccattcctacgcgcttttgtaccatttttaaagcatttactcctacttcgtactcttcaggaaaaaaacgtttaatatcccataataataaattcttaattgcaattccttgtttttttctttctaaagctgtgtacaaatgatccgtcagagaaatataaatggtatcattcaaactctttttcaacgttgattttgcataaacaataatgtcatccgagagtttcatcatctctaaaggaatatttcctaacaattcttgaaacttaagtgatgtttcttgattggctaaataaaaaacttgatcgatactttcatcaggaacccaatccccaatgcgtttcttaaaagcaattcctttgcccataacaatttgctctcgtttatcatcatctaatgtaataaccacattattgtttaaaattttgtgaataatcaatgccccacctcctttgtgtttcgttgaaaaaagaaaaacccaatttcttcaaaaagaacgacacacctgtcgcttcatgaaaaaattaggtttagcttgtctttaaacaatcactatccatctatttacttatccctacatccaaagaataacatatttacaacaaatgtcaacgctttcaacgacatttttttgtaataaaaataaaaaaagcatacaaacattgtttgtatgcttcactatgacccgtacgggactcgaacccgtgttaccgccgtgaaagggcggtgtcttaaccgcttgaccaacgggccattaaaaagaaaaaacggagaaggagggatttgaaccctcgcgccggtttcccgacctacacccttagcaggggcgcctcttcagccacttgagtacttccccaagaaataaatgggcctaaatggactcgaaccatcgacctcacgcttatcaggcgtgcgctctaaccagctgagctataggccccaaataagaaaaaagcgggtgacgagaatcgaactcgcgacaacagcttggaaggctgtggttttaccactaaactacacccgcaaatttttcttggatggcgcgggacagaatcgaactgccgacacatggagcttcaatccattgctctaccaactgagctaccgagccaaaaacggtctggacgggactcgaacccgcgacctcctgcgtgacaggcaggcattctaaccagctgaactaccaaaccaattcgtttttgctttatgcaaatgtatgctttaaaaaataaaagcaattgcgggggcaggatttgaacctacgaccttcgggttatgagcccgacgagctacctgactgctccaccccgcgataattagaccaaggaaacttaattcctaagaaaggaggataagggattcgaacccttgcacggttttacccgcctgacggttttcaagaccgttcccttcagccggacttgggtaatcctccgtaacaaaactatgacccgtacgggactcgaacccgtgttaccgccgtgaaagggcggtgtcttaaccgcttgaccaacgggccattttataaaattatgggcctaaatggactcgaaccatcgacctcacgcttatcaggcgtgcgctctaaccagctgagctataggcccaaaaagaaaagcgggtgacgagaatcgaactcgcgacaacagcttggaaggctgtggttttaccactaaactacacccgcatggcggtctggacgggactcgaacccgcgacctcctgcgtgacaggcaggcattctaaccagctgaactaccaaaccatacttttctttttatgtgcttttgaaatcaaaagcaattgcgggggcaggatttgaacctacgaccttcgggttatgagcccgacgagctacctgactgctccaccccgcgataattagaccaaggaaatttaattcctaagaaaggaggataagggattcgaacccttgcacggttttacccgcctgacggttttcaagaccgttcccttcagccggacttgggtaatcctccatgataaaaataaaactataaacaacgtcacaatggaccttgtaggactcgaacctacgaccggacggttatgagccgtctgctctaaccaactgagctaaaggtccaggctcttccaaatgtataatcgcggcggaggggatcgaacccccgacctcccgggtatgaaccggacgctctagccagctgagctacaccgcgaaactcttatattaaaataagaatggagcctagcgggatcgaaccgctgacctcctgcgtgcaaagcaggcgctctcccagctgagctaaggccccataaaaattattatcgggaagacaggattcgaacctgcgaccccttggtcccaaaccaagtgctctaccaagctgagctacttcccgtatataactaatgcacccaaagggagtcgaacccctaaccttttgattcgtagtcaaacactctatccagttgagctatgggtgctaaatataaaacaatgccgaggaccggaatcgaaccggtacggtgatcactcaccgcaggattttaagtcctgtgcgtctgccagttccgccaccccggcgtaatgaattggctaagcggaaaacggggttcgaacccgcgacccccaccttggcaaggtggtgctctaccactgagctatttccgcaaaatggtgccggctaaaggacttgaaccctcgaccctctgattacaaatcagatgctctaccaactgagctaagccggctaaatatgcgggtgaagggacttgaaccccccanccttgcggcgctagatcctaaatctagtgcgtctgccaattccgccacacccgcaaatgaaatatgaatatgagccgtacagggctcgaacctgtgaccctctgattaaaagtcagatgctctaccaactgagctaacggctcaaaaaatggaggttaacgggatcgaaccgctgaccccctgcttgtaaggcaggtgctctcccagctgagctaaacctccaaaaacaacaattcgcgtggcgacgtcctactctcacaaagggaaacccttcactacaatcggcgctaagaagcttaacttctgtgttcggcatgggaacaggtgtatccttctcgctatcgccaccacactgggtgttgtttcttattgagttgaatcttcattcactcaaaactggattgaagtttgaatcaaaataaccaagttgcttttacttatccattctttggttaagtcctcgaccgattagtattggtccgctccaactatcactagccttccacttccaacctatctacctaatcatctctcaggggtcttactttcttaaagaaatgggaaatctcatcttgaggtgggcttcacacttagatgctttcagcgtttatcccttccctacatagctacccagcaatgcccttggcagaacaactggtacaccagcggtaagtccatcccggtcctctcgtactaaggacagctcct

SEQ ID NO: 551 - DNA, 1807 bp; double-stranded, linear
cctctttcgtatatgtnnctgttgtaacgtaatctcttttcakgatgtgttcytcctaaaagttgtttttgtttacacattgactttaccaagtttagcgaagagtttactatccaccaaaagttagaaaacgctttctttttcggcgtaatttttcattaaaaaaagtttatttatggttataaaccgttggtacaccaggggtttataaaagtttaggcggatttctctctaatttctgaccaatcatagatttgaaaatggtataattattttgaaaaatcattcacttaaaataaaagatgaaaggggtttccaatcgtgacatttgtttttatttataacatcttgttgattattttatattcgtttacttcaacctttaccttaaatctttacttgaaaaataaacaaccgatttttttattgcttctctttttaatggttatttttatttgtgacaatgtgattgtttatatgactgagttcattaattcgtttgcaaccgaatataatcagacctttatgaccgcaccttttttaaagaccatcatttttayttgktgtaattttgcctanctggctattatcaatactattagtggtcgtccttttaaaaattatcaatttgtctggttatttttaattggtttatggatgctagctattccattttcacaaaattccgccttaaaagtttggttgtactatttacccaatcagctatttttaatttaccttggatgctatgcgctctatcaactacgaatagatcctttatcagcccttgcgaaaaaatatcttcgttttattggttggctaagcattggtttcggtgtggcgattcttttggaagataccttcgttatttttaacattgaccaatattctgatattgtctttaaaattaacaaccgaaacgtttctgaagatatttatacaatcattctctccatcgccattatctacttctgtaatcgtgattttcctctgtcggttcttgaaaaagacgctgctaaattggaagaaaatcaatcagatgaacccgtacttttggcgcctttttgtgatgcctatcaattaacgcagcgagaacgagaagtgctttcgttacttttagagtgcaaaacaaatcaagatatagccaacgaactattcctatcaatcgggacagtaaaaacacatatccacaatattttcgttaaattagaagtaaacaaaagagcagaagtttttgtcagttatcaacttttttctcaacaacaaactgaacatttagcgagataattaaaaaggaagcctctccgtgatcggtggcttcctttttgattaactattttcttgtacttgtcgaactctcttttcaatttcttgaaagttaataattttagcttggcgatgaatttcttttccttcatagtataagataatggtcggtgcagaaaaagcatttaattgtccaattatttctggacttttatcagcttctgcaatgtatgtaggaaattcatattttgttgcaattttttcgacaatcggtttatcaactgtacaaacactacaattttttgctgtcaaaaagacggcttgtagacgattgtctgtaattttttcttctaatcytctaatgttgttacatattccactgaatagccctccttgtcytttgtcyaaaataacagatttacyagcaaaataacaacttattgtttggcyaggaakgcyttaacaaaaaagttgtcgcccattttataaakggggsgacaactttttactggataaccgcttattaantaaaaaatttang

SEQ ID NO: 552 - DNA, 862 bp; double-stranded, linear
tgaagtctggttcaccattgtttgaacaaattgataaatccatcgacaagaaagtgaatttattctcaaacagcttttcccgctacgctgttcgtgcaatgcttgcttgtctatttttaacgttgggaacagccgttgcttttgcaatcgcaattaaaggagaaggaatttctcatagtttagggaaaatgctttacgccttcatgttcagttggtcacttgtgatgattttatatatgaatgccgaacttggtacctcgaatatgttgtacatgactgttggggtctatcgtaaaaaagtcaacttttccttagctgcaaaaattttatttacctgtatcttattcaatttaattggtggcgtcttgtttggcttcttggtatcacttacggtgccgttccaagatttgccaaaagatagtttcttctttacatcgattgctggaaaattagaaaaaaccaccctacagattttagttgaagctatgttcgccaatattgtagttaatacagccgtattagtgagtatgcgaatgaaagatgacgccggcaaagtcgcggccattattttcattatctttatctttgcgttccttggttttgaacacgtgattgccaacttcccagccttaagtttagcttactttgcttcgaacggcgcaattgaagctttcacagctggtaatgttgttcataatctgttctgggcctttatcggtaactttatcggtggtggcttaattatgggtctcggctatgcctggttagataaagacacaaaaacttaacgtatttkgattaattgaccaaccaactatactaaaacatggacactgttttagtatagtttttttatnataag

SEQ ID NO: 553 - DNA, 472 bp; double-stranded, linear
gaggttgtcgttgtcccatgacactcactcctctataaatgaatntattacacttattatgttactactattttacaaggtgtcaaatattttcatcgtgctttctgaaaaccatttcaatgataactccattaaaaacaacgtatcacttgattgtctcttttttggtgcaaaattgtgccttttttgtataaataagtccctcgttttcccacaaaaaaaccgctactttttcatctagtttataaaaaagtaacagttataaattattttttctttttcccaatcgagagaatccctctttttatgacatcaaagaaactcaaagattggaccatatgatctgggtcaacatattcacgaatagctcgtaacactcgcktcggckcttttgaagcaaacgtatacgtcccatttttcttggtttgaatcgcataacgaggaatccattttcctttgaacattaccggaa

SEQ ID NO: 554 - DNA, 1062 bp; double-stranded, linear
tatanttttcagcaatcgtttcaaataacttaaataatgtcatgaaaattttaacatccttaacaattgtcctgaccattccgaccatcatcggaggaatttacggcatgaatgtgaaactcccttttgcagagcatgaatattctttttggattatttttgccatcactaccttaatctgcgtaattagtattcgaattttaaagaaaaagaatctcttataactttaggttgctgttttcaggaaaaggttgtacactattagcagaaattaaaaaggacgtgtcatttatgaacgacaaagaacaaagtcgcttttcaaaaatcacgaaagtcgtggtttggctaatgctgatcgcaattgtaggttcaactgttttaacagcgattcttagtctttaaactggagaactttttcacacattaaaagtaaaaaaacagccccttctatcaattgaaagggctgtttttttacttgctcaaatagagcggctattttttcgccatcgccaacagctcttgtgcatgttcaatggttaatttcgtaatttcacttcctgcgagcatacgcgcaatttcgtttactcgctctttttcagataaaattcggacgcttgtttctgtccgccccgccacaatttctttttcaataaaataatgttcatcggcaacggccgccacttgtggcaagtgcgtgatacacaacacctgcgaattttctgaaatttgataaattttatcggcaatcgcctgtgctactcggccactaactcctgtatccacttcatcaaaaacaatactagtgatcccttgcgtttgagaaaagattgttttcatagccaacatcactcgcgaaagttctccgccagaagccacccgaactaacggttttaatggttcccctgggttagtagtaatataaaattctactccgtctaagccattttcttgtaaatgctcaagttctgtaaagcggacttcaaattcagttcgctccaaatatagttcttttaattcggttaaaatttgttgttcgagctctttggctaggcgctttcgttc

SEQ ID NO: 555 - DNA, 1237 bp; double-stranded, linear
ttcctgattgaagcaaagagaggtgtagcgctatggaaatggaacatattaatgaaaatacgattcgtgtgttaattggcaacgaagacctggcggatagagggattacttttcttgacttactaggaaaccacaaagatgttgaaaatttcttttatagtattttagaagaagttgatgtcgaagatgagttccaaggcagtgaagcagtcactttccaagtcttgcctaaaaatgatggtttagaactgtttattagtaaaaatgtcgctatggacgacttgtcttccttagaaggtctgagcgaagtcaatgcagatgttagcgaattgattcgcaaacaaattgaagcagacaaagcagccgccgatgaacttgacgagatggaagccacagatgaaacaaacagaaatgtaatctttgaattagataattttgaagcgatgattcaattatccaaagaagtcttcatgcaatctgttttgactaacttatacacgtacaacgatcgttattacttacaagttttgttcttaaccgatgaattagaaaaaacaaatgttgacaatgaaattgcacagattttagaatttgctcataaaacaactgtcactcaggatactttagtcgaatatggcacttgtattatggaacgcagtgcattggaattaacacgttattactttaatgattaagcaaaaaagcaaaaactttcgagtttcttkttktttggatgaaaattaagaaactttgcgtagtttatttatgagaggtgaaaatcatgttaacagctttaacggcagacaaccaagaattattttctttaatcgattgctcgattgatgaattaacacagatacgaagcgaacaagcttttgtgtgtccaatgtgtcatcaatcggtcattttgaaggcaggccccattaaaataccccattttgctcatcgtaaaaagaatagttgttggtacgaagcagaagctgaaacagaagaacacctccgcttgaagcagctttttgcggaaaagtgtttacgcgaaaagctgtccttccaagttgaggcatacttacccaccttgaagcaacgcccagatttactcattggggaagatagccattgaaattccatggtagtccattggccattaaancgtttggtagaaccggacggagacttaatcaaactccatggctaatngagtggtttgggattntggtggaccgattaaggcctanag

SEQ ID NO: 556 - DNA, 1306 bp; double-stranded, linear
gctattcaagatganttaagcgatactaaagacgaaatacgtgaagtgacgaaacaagcgagagaagaaacanaagagtataaagaaatcttagaaagtaaaataaaagaccataacaaagtggttgataaatcgaatacagcgctaaaagtgatgacaaaaggcgttacaaatatattttttgtgctaattatttttgtacttgtaatgcttgtgacaggtccgataggtcatttctttggtattgaacatttatatagctttattaatggttttattgatgaccacgaaagtgcatggcgatatttgatgttgatactttatgcagtaccctatgtattcttcgctatcattctgtggctcatagcattgttttttagagtatttaatgacctttaggtagatttatatataaaaagggctaaatacgcaaaatacccccttaaaatgcaaaataaatgcaaataagggggtaactccttatgaaaaaacaactaatagtattataacacgtttttatgccgagaaaacttattggttggaatgggctatgtgttagctaacttgttagcgagttggttggacttgaattgggattaatcccaagaaagtaccaactcaacaacacataaagccctgtaggttccgaccaataaggaaattggaataaagcaacgaaaggagttgagtaaaatgagtgagaaaacgaagaaaatcattcgagtatcattagctttttcacaagtagtagtgcaatcattgatagtttattatacttaccagcaatataaattatctaaagagaattaagttttgattatgtaataagttttggtactaaaaaagacttgatctaattagaccaagtcttttgttagtgttatattaataacaaaataaaaataagaagtcgctcactccccgaccaaagtttgtgagcaaaataaacagtcgatgtttgtttcttaattgtatatcttgatattaaacgatttaagattattcttcaagatatatattcgcaaatgtaattggaaaagcgacttcttaaacaaaattaaggagtcgctttttatggcaaaaataacgrwaaatgagcaagaaaatttggtggaaaattacacaaaaaaaccggcgtactccaaactagtcaagtccagactcctgtgtaaaatgctatacaatgtttttaccatttntacttatcaaaattgatgtattttcttggagaataaatccattcatcatgtaggtccataagaacggctccaattaagcgattggctgatgtttgattggggaagat

SEQ ID NO: 557 - DNA, 1268 bp; double-stranded, linear
ctatttaatcttgctcacgttgttttctcttggctgctcgttctgcgcggngggcagcccttcttgcttccgcttccggatcaactacgcgttcttttttcactcgtggcttctcgttctctggcgtatttatttctggttcactttgtttttcaagttttgctcgaattttttcttcttgaccagctaaacgagcataattatagaaccgtctcttagcatcattaattgttttattaaataacaattccgctgtatctggttgactggattctaaggacgcaaagcgaacttgttggcgcataaactctttcattaatgaaaaatctggttttttgaaatccaatatcattggttctttgcctttttctcgcaataatggattatagcgatataaagaccagtaacctgaatgaaccgcgtctttcgcttctttcaacgtttgactcatcccacctgctaaaccatgtgtaatacatggtgtataagcaataataatcgatggtccagggaatttttctgcttcttcaaaagctttaatcgtctgcatttggtttgcacctgaggcaatttgagcgacatagacattttcataagtcattgccatcatccctaaatcttttttagaggcatacttcccactggcagcaaatttcgcaatcgctgatgccggagttgctttggaagtttggccacctgtattggaatagacttcattatctagaactaacatatttacatccgcgccactagctaacacgtggtcaataccgccgtagccaatatcgtaagcccagccgtctccaccaatcatccactgacttggtttaacaaaaagatcttgatcgtcataaattgcttccaataaaggttgattcgttttttcttcaagcaaagctgcacgtaatttagctgcacgttgttgcgtaccttcactttcggacagatgtgctatccaatcttccatcaataaacgtaaagaatcactggctacagaaaaagctttggtcattttactagctaaacgttcgcgacgcgcttgcgttgctaacaacatgccgtaaccaaactcggcattatcctctaaaagagaatttgaccaagctggaccttgtccttgttcattagtagtgtaaggtgtcacacccgctgcagcaccccaaatcgatgagcaacctgttgcattagcatcagcattcggtcaccaaacatttgcgtcaataatttaacataaggcgtttcgccgcaaccagaacaagcaccagaaa

SEQ ID NO: 558 - DNA, 1060 bp; double-stranded, linear
gttttaccttaaaacaaagggcaatcagtgttaaaacaatagtcattaaaggagcagcacctaaatcaattaaaggtttaaaaattgtatttgctaggtcaataatcgtattcatttattttctccttcataagctaagataacaaaatttttatcttagttttgttattgttgacagtgaagcgtaagtaattagtctgaaaaggaaatcatttgtttaaagagtgaatgatactttccatttgttgataaacaggttcagccattgctggaattcgataaagaattgcgcctgcatcaactacaggaatcgtgattgggaaacccaaatctgttttggcgatttgggcgaaaatatcataatgggatagcatctcttgattgatatctttaatcattacggcatcgcaagaaacttggtagcctcttttagataattctgtttctaatgcagatttgatttgatggctagagtttaccccagccccacatgcagctaaaattttgatcatgttaaatctctcctttaaaatttttttgtaaaaaacgataaacttcttctttatcttcacattgaaaaaaagccaatagtgatgaacggtctgtcgtgttaataaaatccatgatagtcgctaaaagacccgtttgttcaataccgttttcatttaaaatcatgaaaagaaaggraacagagagcgttycatctgggrtaatcatgttatgaaatgataaggattgtttcaatttaatncgggataattcttgtcgtccgtacaaaggtactttcggtatgcggaatggcgatattcggtagtgcaggatcaatcggtgttaaacttaaaccagtcggatagttgtgttctcgttccaataaattagttagaaaatncaggtgtaactaatttcttttttaacaagtctaaataaacttcttcaaaaacttcttcttgtgtttttttgtttgaaatataggtagtatctaatgaaaaaatcgatgttttaataaccatagaacccctcgtttctttaatatattattanttatttacaagtataatat

SEQ ID NO: 559 - DNA, 1565 bp; double-stranded, linear
anatnccaaaagaattaaaagacaaaaatttactttatgaaaaacgtattcctccgaaaaaactctctactggtgaattcaaaaactatccaaacagattgtatttaggtaagctggaagtttcagcaacagatgtttacgccatcagtaatgctagctatacaaatgagtttcccgaaagtgggaaaaaccaaccttcggataaacatgataaaatcggcgtttctttcgaaagtgggaaaaaccaacgtccagaagaatccaataataccagtactttgttcgaaagtgggaaaaaccaacccaatctatatctaactaattctttagatacaatagatacaatagatactgaaaaagaacgattgcaacaacaattattgctcgatcaattttcagaagttcaagagcatacatttcttagcaaagatagcttaaaatttattgctgccttttctgatactattcaagaagcccatgaaatggtwggaacaattattcgtgctaaaactaaagtagaaaaagaatacaatmtcgttctaattggtgaagattatcaagaagaaatagacaaatgtttgcgacgagtgatgcataaaatcaagacggattctactgttaaaagtcctaaaggcttattttacaagtctttttacaatttatttgttgaatgtgcactagagaaaaaaagtcaattgaacaagaaaagtaattctaacacaccaggagtaatcactcataactgggttgaaaatcaataaagtagctgtttagtatgaatttaaatttatggaggaaaattatatgtcttttgaatctgaaaataaaaacgtagaaaaaataattgtgtctaataaaacgtattatcttgttgggacaagtcacatttcagagaatagtgttaaacttgttaaagaggttattgaaagagttcaaccagatactgttagtatcgagctagataaaaaaagatatgaaaaatacactaactctaaccaatggggaaatacagatataataaaaattattaaagaaaaanaattagttgttctaatatccaatattgtttacagtgcatatcaaaaaaaattagcaaatactaaaggaactactcaagctggtgaattaattcaggcaattaaaagtgctaaggaaataggagcaaacattcaattaatcgatcgtgatatccaagttacttttaaaagaatgtggcgtcatttaagctttttggaaaagccaaaactttttatgacattttttactgaatttgatgatattgaacaagataaattagaagaatatttagagtctgatagttttgacaaagtatttatttcgttatcaaaaaaatatccttcgctgtatcaggatatgatcacggatagagataagtatatgtctactaaattgamaaataattcaagtcaagtgaatgttgtggtggttgggaaagctcatatgaaaggaattaaagagaagttagaaaaaagaacagagttttccttagataatttaaatgaaattccaccaaaaaaattargtmctaaattattagaattncc

SEQ ID NO: 560 - DNA, 780 bp; double-stranded, linear
ccgtggaaccttctaagtcaccaccaatgattccaggtagccccattaataaaatatcgttggataataggctcttttaacncgatcagcatcccacgtcccataattaataatgcaagcctaaaacaatactcggaatttgaataataatatgtgaacggaaggggttaatatctcttaaccaatgcacttgagtgaaggcttctggaatagtggctaggagcaccatcataattcctgaaaaataaagtaaaaccacttctagcttgtgggcaatttccaaagtaatttgttttagcagttgacgataatgagtatccaacttttggcttaagtgttttgtaaagaacaaacagccaattaagaacggaataatataatagaataaacgatagagcaataaccacaaaacaataatttcacgatcgacacctaagttgctcagtcctaaaatcatcatgacatcaaaactacctaaagcccctggaatcatcgaagcaatcccaataatcgaagctgctacatataaaggaacaatatcaattaaaggaatcggtacatctaataagtaaccaatactgataaaggtaattaaaacacctgtccattctaaaaacgaaggaaaccactagagataagcgttttttgcatcgagggtaccaanggactatttttttgggaatgtaaattagttaagtacnggaattaagccgcacctaattaccnatcccatattgctgtaataagcctctttgntcaactgaccagggaaagcaagat

SEQ ID NO: 561 - DNA, 1610 bp; double-stranded, linear
gaatgtggatttaattgatcgtgatgtgtttggttatgctgttgataaaggctggatgtgtgtccaagtattctttgtcagacaaggaaaattaatcgaacgtgatgtatcgatttttccattttatgatgatgccagtgaagcatttttaacttttattggacaattttatcaagagaatgagcattttgtgccaaaagaagtcttgattcctgatgacattgataaagaaagcgtcgaagctttattagctacgaaagtcttgcagccgcaacggggagaaaagaaaaaactggttaaattagccagtaaaaatgctgcagttgctttaaatgaaaaattcgatttgattgtacggaaacaagaacgaacaattggcgcagttgaaaaattaggcaatgcgatgaacatacctgcgcccattcgaattgaagcatttgataattcaaatattatgggaacaaatcctgtttctgcgatggttgtgttnattgacggacggccagctaaaaatgagtatcgaaaatataaaataaaaaccgtccaaggtcctgatgattacgcttctatgagagaagtcatttatcgcagatattcacgagttttaaaagaaggcttgccttttcctgatttaattttaatcgatggtggtaaaggtcaagtcgatgttgccaaagatgtgttagccaatcaactaggagtcgatattcctgtagctggattagccaagaacgacaagcacaaaacgagtgaacttttatttggtccaaacttagaagttgtaccattggaaagaaactcacaagaatttttcttgttgcaacgaatccaagatgaagtccatcgtttcgccatcacattccatcgtcaattacgtagtaaaaatagttttgcttccaaattagataacattgaaggcttgggaccgaaacgcaaaaaaaatcttttaaaagaatttaaatcgcttaaaaatattacggcagccagtgttgaagaattaagaaaagctgggttacctgaaactgtcgcaaagaatgtgtatcgtcatttgcatcaagaaacaacctctgagatagaaaaataaatgaaaatgaaccagaccmattaggtgcttttcctaatttgtctggtttttttattcaattttttcatgaaaagttgaactctcaagaaaatatgataacgatttctttcgtgatatactaatactaacttaaaagagaggacgtctgatcatgaaaatactaacacccgtttatcaaataaaatttaaaaaagtaccaaatcaattactgattgatgagcgtttaatgaatgaattgggtagatggctgaatcgtacaggtcgaatttgggcctgtcaatcatcaaaatcggcaaaggaatttaaaaatacattttatgaaagtacaggcttgtccgcaaatgaagtgtatatttctgccgagacggatggcctttttcgttagcagaaataaagcgctgttaaagtgcacatctttccataacaatgtcatgncagccacacggaagtacgttggtactaacacggttgaaaangaaggggcgttagtgtanggaaaggtagcaaccttgggattaacngtgac

SEQ ID NO: 562 - DNA, 1227 bp; double-stranded, linear
tgaataataaataaaggagagaaacaaaatgaaagatacctttcgcttagaaaaccagacgatttattttggtacagaacgggcaatttcagccagccctcaaacgatttggcgctacttaactgagacagacaagctaaaacaatggtttccagaattagaaattggtgaattaggtgttaacgggttttggcggtttattctgcccgattttgaagaaacaatgcctttcactgattatgcagaggaaaaatatctgggcgtgacttgggatactggtatcatctattttgacttaaaagaacaagcacctcatcagaccctgttagtcttttcagaatctctcccagaaaattttacaacacctcgccataaagatatcgctggttggtcaattgttctcaaccgcttgaagcaagtagttgaaacccctgatgcagcaccagaaaaaatagattttccgcaaatagaaaatcattacttggaaaaattaacgaatttagaaaattaaaaagtgtggcacaacgggtaaatcaccctctgtgccacactttttaaaaacgtaaaatacgctgataaacaaataaacctaaatcaattaagcaaacaacaaaaattgccaataatacaaaagagacccgcaactctgcggcgtacatccctcgtaaactaattgttgccaaacataacccaaaaatcgttgccattgtcacttgtaacacggttcctggttttagggcataaacaaaaatgccaatcaaactagaaacaatgaggtgtgtcagtggcaattgaagccaattgacaacaaacagactaaggaaacatcctaaaagagtcccccaaaaacgtgtcttaatacgcgtgttcatttctgctttcactggatgcaagagtagaaaaacattcatcggaatccaaattattttaatgcctcctacactccacattaaaataaaactcagtgtaatggtgaaactcatacgaatagctaaacgaaatcgtgcaccctttcgtcaggactttctaaaaattgtttgaaacttgtaatcccaaaaaaaatctgttgtaagtcgtgccagaaattaataactgccaatttttgttgcttcatatttaattgaatgcttttaaaaaaacgaacatggcccctactctttaagctagttagctgacgtaatcctgtttgccaccaagcgtttaatgttaaagccaataaaaaaagac

SEQ ID NO: 563 - DNA, 1619 bp; double-stranded, linear
aggatcccgcatatttaaagcgctcgtgatncagtcaattaaatcttgaggtgtgactaccattgttgctccaatatcacgagctttttgttcttgtttcctcttttcatttgtatcttgatctattatatcgccaaccgacgtgaggtgatgtccaatttcctctgcaaccgtactagttaattctctaggatgttgttgaggatttaaatacacaacattgttaatatacaatcctttttgcttttcgggcatgtttggttcaaacttatacgttaaatctgaaaagcgagccatcagttcttctgaagttaccatttaaacacctactactttaattatttgtgatcgcgtttcttaatataatcaatgaaagagagaatctcattcatttctgtatctgaaacgttatcgtctatatgagcagcgacggttaattgtttttttgataaggaagtatcttcaaaactttctctcccatgtaaataatctaaacttacattgaaatagtcagcaatcttattttggatatctatatctggagttcttcttccttgttcataggaagagtaagtcgttctagctacaccaagtgcatttgcaacatcagtttgtgttaattttttttgtttccttaattctgttaaacgtgtaccgaacataatgttacctcctacgattcgttatgtacatataatactacgcaatctgagtagtttgaagttaaatatattaaatgtgtcaaaaagagtaattaattgttgacatgtgtcagaatgcgtagwattataaaagtacgcaatacgacacataaaggaggacacaaaatgagagattggctattggaattgcgtataaaaaataaaatgactcaagaagaggttgccgttaaagcggaaatttcaagaaccacgtatgcatctattgaacagggaagaagaaggccatctgtggaaagtgctatgcgaatcgcatcaatcttagattttgattggacaatttttttttgagtaactatgactcgttatgactctttatatttggataggaggtgaaaatatgccagaaaaacaaaaaatgattgatttcattttggaaatcatgccaaacgtaaagcttattgttgaactagcmacagatgatcagttagttcgtctgtatgracaagcacaggataagttgaactatcmattggatctaatctaattgtacaaaaaaatacatcatataaaaagatggttaattaagaaaggaagaagtaaaagtaaatgtcaatgtcagtaatattaagaaagtcgttaatcgaagttcttaataagaaaaatgaaaagaagaaagatgtagcacgtgaaatcagtacatctcaacaatcattgagtgattggacttctcagaataatgttaaaccagtaacaattgaaaatgctctaaggcttagtgatcactttagagattcgactttcacaatggaagttattcatcagttttttggaatgtttaaaacttgcgatggagatgtttatcgaaaagacccttcgtcattggaccgattacagaaaattgaatctaatgagagannagcattgaagcatgacatagaaagaattgttttgaaaaat

SEQ ID NO: 564 - DNA, 2082 bp; double-stranded, linear
atcccgcaagtcgtcggtnctaaaggaaaactaggacgaaacaatgtaatttttactttatctttggcttactatgcgtcaaaaattgaacaagaccgctgttttgatgatatggatgtattcaacagttctttgaattatcctctatcagtttcagaaataaagagaattgttaagagtgcttactcaggtaaatataaaggcgcaacaaaacctatgtgcaagaactagtgtcaaattggggattagaatcgttatctgaggaaaaaatgtttacacagcaaagaaatacttggtacaaatttaagaaggaacgtcataaaagaaaaaaatctcacctttccgaatggaaaaaagatattttagattaccttgaaacccagtgttatagatatcgacctgaagttagtatgaagaaaacagatttgcaagcggctgttactttcaatgggcaatcgattcctaaaagatcacttgaccgtgcactacaagaattagtggccgaaggtaaattatttgtacaaacaaaagccggtaggggtggaggactagtagttgctactcggaaagcattaattcgtacagttattcaagtaaaacagcaagtcaaatatgcttataaacagggtattaagacattctttaaagaagctgatatgttagtaagactgtttgaacaaactgataaanacagtcaaagagccagagaatacaagcaattaaaactatggaacactggataaatttaaacatgtcaactgccaatacattatatttcttttatacttaacagctatataatttttgtattattttttttagttatttgttaaaattattttatacaagccttattatttggttagtaacttttaacaacggagggtgataaaaatgaagaagtacaaaaagttttgttttttaggtgtttggttattacctttggttttagctagttgtggtacaaatactgctacaaatgattcacaagatataaccgaaaaaaaagtagaacaggtagcgactttggctgcagggacacctgttcaaagtttagatccagcaactgctgttgatcaaacgagtatgactttattatccaacgtgatggaaggtttatatcgattagatgaaaaaaatcaaccgcaaccagcaattgcagctgggcaaccaaaagtgacgaataatggcaaaacatataccattgtgattagagatggcgctaagtgggctgatggtacacaaataactgccagtgattttgtggctgcgtgtcaaagagttgtagatcctaaaacagcttctccaaatgtggaactgttttctgctataaaaaatgccaaagaaattgcttcaggaaaacaagcaaaagatactttagcagtgaaaagtattggtgagaaaacattagaaattgaattagttgaaccaacaccttattttactgatctgttatccttaacggcttactatccagtacagcagaaagcaattaaagagtatgggaaagactatggtacttctcaaaaatcaattgtaacaaatggagcatttaacttaacaaatttagagggagtaggcacttctgataagtggacgatttctaaaaataaagagtactgggatcaaaaagatgtttctatggataaaattaacttccaagtagtcaaagaaattaatacaggaataaatttgtataatgatggacaactagatgatgcacctttggctggggaatatgcaaaacaatataaaaaagataaagaatattcaacaacattaatggccaatacaatgtttttagaaatgaaccaaactggggaaaataaacttttacaaaacaaaaatgcccgaaaagcgattagctatgctatcgaccgggaaagtctagttgaaaaattactagataatgggtccgttgcttctgttggcgtagtaccaaaagaaatggcttttaatccagtaaataanaaagattttgctaatgaaaaattagtggaatttnacaaaaaaaaagcagaagaatattggggataaggcaaaaaaagaaattgatttatccaaaaatactctttaggtttn

SEQ ID NO: 565 - DNA, 1091 bp; double-stranded, linear
aaatgacttgactgttgcttcagttgncagcattcaccttgcttttagcaggctgtaacacaaccaataataaaggcacgaccgcaacgagtgattctgtcgctaaatccagtgaaagcaaaacaaaggattcggtcgacttaaattcactagatttaccacaactagatgacaaagttgccgaagatcaagacttagtccaaatggttacttcaatgggaaatattgaaatcaaactatttcctaaacaggctccaaaaactgtcgagaactttatgaaacatgccaaagatggctattatgatggcttgactttccaccgcgtcatcaataactttatgatccaaggtggcgatcctagcggtgatggaactggcggaaacagcatctggaataaaccatttgaagatgaattttcaaaccagttatataacattcgtggcgcgttatcaatggcgaatgcaggrcctaatactaacggcagtcagttctttattgtccaaaatacagatgatcaatctgatggtcttttatatgatgattatccaaaagcaatcattgatgcttacaaaaaaggcggctatccttctcttgataaaaaacatactgttttcggtcaagtaaccaaaggaatggatattgtcgataaaattgccaaagtcgaagttggtgccaacgataaaccaaaaactgatgttaaaattgaaaaaatcaatattcttcaagaagcaaaaaaataacaaaaagtcagaacgtacgctgaagatacgttctgactttttgttatttttgaatcgcttgtaatgcctttctggtacttggkcytgkttgacctcytcatacgtattgatgtgggccccttwattkgrgmcttttagataatgrtctgkttttaawtcakggtccgctgtgaaagktawttcycgcgktttgccttcctcatctgcggctacttgcgtataactagcaattccatagccattaacgctaatcggctttccttgttttaacatacacatttcctgctttaanccaatgggatttaaatgatcctancacaccagctaaattcgccagaggtccnctcctgc

SEQ ID NO: 566 - DNA, 1575 bp; double-stranded, linear
atttcgttcactggtaaattgagatatttcaaaacaccttctcgattttgaacttcatcaaaacaaatcactgtaccaaaaccagtaccatcttcactatcatccaaatcatttgttgattgtgtaatcaatactaagaaattattaaacgaacgtccaatacgtttcattgattttaaaatcgctttaccttctggcgaagattgaaaaatccaagattcatcaaagaacgtcactgtttcttcttttggatttcttgaaccaaacttcgaacaaaatgttcctaaagcaaacatcaatgtaacagaaagacgtttattttcatctaaattttcatttttatcagttggtaagtctaagtcctcaatttctaaaattgttactttcttatcgaatgatagaccctcaacatcaccatgagaaaaagctaattctaaaactgaacctttaacagtcgacaaaataaatctacccatatctttcacgtcagaaatttcactttccactaatcgctcaattacatgccaaaatccaacctttttgccttctttccgttctaaaacaactttcgcaatcgcttcattaatttctgttttttgctttaaattccatgttccttcgtatatattggttaacattgctttagttgttgcaatcgcttctgtttcatcaaataaaacaatcgggtcaagcacgccatggtttttcgtatcacgaacatctaaagtgacgaaattaaaggacttcacaaaatcaacatctaaaggatatttcttttgatattcagggtcattaattgtgtacataaattgctttcgcatttctttttttggatcaatgtataacactctgtcttttaaaagtgccatttgcataaataaggttttagccgtcactgattttccattcccagtatcacctgtaagcgcccaatgtgggttgtttgttttctttccatcaaccccttctttatttgctaatagcatgttcataaaaattagattttttgaactagaaataatagattttctatcttctttttcttccaaagttgtatccactcgtccaaggtaaaagcctaacttcgtacctgcatgaagtgaagtaaagaaattcaactcggcaaacgattcaatcgttgacgtgtgttgccaacgagaagtctgcattcgcaaaaaattaccaaataaggttgattgaaataaataaggattatcaaacgttgctttaataagtggaatatctaaactatcaaaacgattgattaaatatttttttcttgcacgcatttgttttttcgtgctaccactaacaacaatcactgctttccagtcaataatatccacaccatcatcaattttttggtctaaatcgtcaagtgataattgaccttcaacaatctttcgtttttgtttagaaccagctaagtgtgcttcctgcatgatattcttagtgcgggttcttgcacgtgacgaacgcccagacagtgctaattgccctttactttctgcaaaagtcgcttgaatcttcacttcgactgggaaaggcattttttgaacgacctctaaaaaatgt

SEQ ID NO: 567 - DNA, 1158 bp; double-stranded, linear
atggtcatttaaatttgattgaacgcatgcgnaagttatttgacgaatcatttattggcgtttttataaatacaagtaagcaaacattatttacgccagaagagaaaaaatatttaattgaagaagcaactaaagaaatgccaaatgtgcgtgttattatgcaagaaacccagttaactgtggaaagtgcaaaatcattaggggctaattttttgattcgtggcattagaaacgtcaaagactacgagtacgagaaagacattgctaaaatgaatcaacatctggcgccagaaattgaaacggtttttctattagcagaagaaccatatgcacatgtaagttccagtttactaaaagaagttttacgttttgggggcgatgtgtctgactatcttcctcccaatatttatcatgcgttaaaacaaaagaagaatgactggagctaaaattatgaataagaaaacagaaaaattttcgtttaaatcactcattccaatggtattggcattgctgctaattggtttgtttatcgtcccaattccttattatattgaaggaccaggaacgacagaaaatttaaaagagtttgtaactgtcgatggaaaaaaagatacgcagtctggtgctttttatttaacaacggtgggcattcgttcggccactattttttctgccataaaagcaaacttttcggattttcaagaagtcatgtccaaaaaagaattaatgggtgatagtagtaatagcgaatataatcgaattcaacaatactatatggattcctcaaaaaacgccgcaattgagcaagccttaaaattagcgaaggttccatatgagatgaaatttaaaggcgtctatgtgttagcgatggaagacaactcaagttttaaaggaaaaattgaagttggcgataccgtgacaggcgtggatggtaaatcttttaaaagcagtgaagaattaatgaattacattaaagcacaaaaagtgaatcaaaaagtcactgttcaatttattcaagatggcaaagcaaaagaagcgaccggcaaattaattgaattgccaacagataaaaaagcggggattggtattggtttgaccgatcatacagaaattgattcttctntcccagtatctattgaagcgggtgatattggtggg

SEQ ID NO: 568 - DNA, 2108 bp; double-stranded, linear
aatcaattcgtgactgttcggaatgccttgaattggtctttcaatatccctgtcgttcatgttaataatgagctaagaaaaaaaatgggtgatgataatttcycttacaatcactacttaagtaaaatgaactatccagcttcagatgcttgggcttacgaatctgcgccattgggttcagtagaaacaaatgttgtaacacaaacaaacggcttccaagcgcttgctaacaaaggtaaatatcaaaaagcctacatgattgaaaaaatcacagacaatagcggacatgtggtctacgaacacaaagatgaaggaacgcaagtttattcaccggcgaccgcttctattatgaatgacttgttgcgctcagtggtggattctgcgaatacgacaaaattcaaaccaacgttagctggcttgaatcctcatctagctagtgctgattgggtcggaaaaactgggacaactgatgagtttaaagattcatggctgattgtctctaccccaactgtgacactaagttcttgggcaggacatgatctaccagcaccaatgacgatgaccagcggcgacaataatgggaattatatggcgaacttagccaacgcgctgtactatgcgaatccagaattgtttggcattggtcaaaaatttgaattagatccaagcgttattaaatcaaaagtttctgaatttactggtgaaaaacctggctcaattacctataatggtgccaagttcaacacacctggcaaaacaacgacttcatactatgccaaagatggtgcaccacaaagtacctataaatttgggatcggtggaacagacagcaattacgcttcttactggggaaatcttgctccacgtgccactacaaataataacaacaataacaataaaaacaacgataataaaaagaataataattaactcgctaaaatgagccagaaaacgtattttctggctcatttttaggtatcaaaaacggctaaactaagagttaacgctcttagtttagccstttaattcaatttattttgttgaacctttttgatcaattccataaggtaaaacactgttttttcttcaatttcttctttgttcattagttttgttaataaacgcattgacacggcaccgatatcatataaaggttgtgtaatacttgatagacgtggacgagagacttctgtaagcaatgagttattgcttgtaatgatttcaaattcttctggaactttcacaccagcatctagcatcccatctaataagccaattgctagctcatcatctgtaacaaaggcagcagttgccccactattacggacacgctcagccaaattaatgcctgctttaaatttatattcagattcaaaaactaagccttcattataagataagccattttcggctaaagcttctttgtagcctttcattcggttttgaccattaattggatcgattaatgcaccactaacaaaagcaatttttttgtttccatttttcgctaaagtcgctgttgcatctttcgttgcttctgtgtaatcaatattaacgctaccaacttgttcgtctggatcaattgaacctgctaagacaacaggtgtttttgaacgtgaaaattcaccacgaatatcatctgtaatgcgatgacccataaagataatcccatctacttgcttggcaagtaaattgtttaatacagtaacttctttttgatcgtctccatctgaattagctaaaatgatattgtatttatacattgtagctacgtcgtcaatgccacgtgctaatgaagcaaaaaatgcattactaacatctggaataatgacacccactgttgtcgtttttttacttgctaaaccacgtgcgactgcgttaggacggtaatctaagcgatcaatcacttctaagacttttttacgcgttgctggttttacattgggattaccattgacaacacgagaaacagtagccatagatacatttgcctctctagcaacatcataaattggtaattgtttgtntttccatgtttcttctcccnataaatatgaatttggntctcattttctgaaaacanctggttaccatttctgtcctagccc

SEQ ID NO: 569 - DNA, 1151 bp; double-stranded, linear
ttttgacttttaatcactattttgcaaaaaantcagacttttttcattatttaagagacntcccgcaaaaagaacttttctttttttgctatttctagtaaaataattcattgagagcaaaactatacggagaggagagagtttcaatggcaacaggttgggtagtattaatcgcagtaatcgctttattagtaggcgctgcagggggctttttccttgcacgcaaatatatgcaagattatttcaaaaaaaatcctcccgttaatgaggatatgttacgcatgatgatggcatcaatgggtcaaaaaccgtcagagaaaaaggttagacaaatgatgcaacaaatgaaaaaccaaggaaaatagtaaaggttattcaggtaatcatgaataagtgtaaaaacgggctgattttcagtccgtttttttgttgttttgcgggagaataggataatctaggaggaaaagagcgaaacgtttaatcaaaaacaacaataacgaagaaaccttctagctcgaaagtagtcttcgtagaacaacaaagtaaaaggagggacaactgaatgtccatattcaaaaaattaggctggttttttaagcaagagaaaaaaagttatattattggggttttctcattaatgatggtcgctcttgttcaattagtcccgcccaaagttattggcgtcgttgtagatgaaatcgttaacaaagaaattcgcttaacgaaaattatcgtgtgggttgcactcttgattggtgctgggcttgcccaatatctttttcgctatatttggcggatgcatatttgggggagtgcggctcgtttggaaaaagagctacggactcaattatttcatcatttcacaaaaatggatagcatcttttatcagaaatatcggacaggtgacttgatggcgcatgcaaccaatgatttaaatgccatccaaaatgttgctggagctgggattttaacgtttgccgactctgtgattacgggaggmacaacgattatcgcaatggttctatttgtcgattggcgcttaacattaattgctttattaccgctgcctttattagccgtcacttcacgagttctaggttctaagttgcatgatgcctttcgagattcacaagctgctttttcagcgatta

SEQ ID NO: 570 - DNA, 736 bp; double-stranded, linear
aaaataatgaaggagaatagatatgggaaaatttcaagtaattgatcatccgctaattcaacacaaactaacaatgattcgcgaaaagaactgtgggacaaaggttttccgcgaagttgtcaacgaaattgctatgttaatggcttatgaagtatcacgggatatgcctttagaggatgttgtcatcgaaacaccgatgggtaaatcaacacaaaaaacactttcagggaaaaaagtagcaatcattcctattttacgtgccggcattggcatggttgatgggattttagaattaattccagcagcgaaagttggacacgttggactttatcgtgatgaagaaacattgcaaccgcatgaatacttcgtgaaattacctgaagacattgcaagtcgtcaattatttgttgttgacccaatgctagcaacaggtggttccgcaattatggccatcgattcattaaaagaacgtggtgctagcaacattaaatttgtatgtctagtggccgttccagaaggtgtgaaagctttacaagaagcgcacccagatgtagatatttatacagcagctttagatgagcgcttaaacgaagacggctatatcgttcctggtttaggggatgctggtgaccgtttattcggaacaaaataataacaaaaaaccgttaggtaaccgattatggktactaacggtttcttttgcytaaagamcttyctaggtgtwtataaaaataaa

SEQ ID NO: 571 - DNA, 5621 bp; double-stranded, linear
cgaaagctagatacggcggtaagtaagcaatcgattatcgattgacaactacgagcaaaagctgagacacatgtctccagctgactatcataggatttagtatgtgggacagcagtcaagcatgacttttgtcccacatattttcttttatataatatggtggctcaactggaaaagaatacttcttttccgttcattatgttatgatagacaagaaaaaaacaccaaaggagagagaagaaaatgacgatcaaagaattcattaagaaaagtcgcttgaaaacatgggacgttattattattgctattttagttcttggttcttttctgccccttgttgtttttgccatgcaaaaccgtggtcaagaagcggctacgtatcaagcagtcttgaaagtagacaacaaagtaatcaaagtctttgacttaaaaaaggacggcccgcattatacatataaatacgaagcaaaagacggtgattacaacctgattgaagtagatggtgatcgtatccgcgtgaaggaagccaactgtgctgacttagtggatgttcgacgaggctggatttccaaacctggtgaaaccccgattgcctgtctaccccacaatttgtttatcaccgtggaagcttctgatgggagtgaagacggtagcttaatttattaagcacgacaactatgagcaaattacacaagaatatttatattgctatgctcgttgcccaaggggtcattattggcttaatcgaaaatatgattccttaccctttcgcatttgctcctggggcaaagctcggtctagcaaatttaattaccattattgcgattttcaccatgcgtaagcgtgatagttttttcctggtctgtttacgtttgattttaacgacattactgggcggcacactttcgacctttttctatagtgccagtggtgccttattaagttatttcggcatgttgcttgtcaagcagctggggccaaaacgggtcagcattatcgggattagtgccgttggtggtttcttacacaacgttggtcagttgctaacgacctctttctttgctcattcgtgggcgccgatgctgtacttaccanttttatctctgtttggggttactctcggggatgccattggggattgccgctaatnattacyacaacatgtccagacgttacgaaaattccaactgaattatgaacaaacaacgaaacataagtggagtcaatttttctaattgaaaacctgtccgccacaattaaaggagtcatcttatgaatatacatcctatgtggaatacctatcctacgttatcaaaagaattaacaactactcttcgcttgatggaacaagcggttcaaatcgataatcaagagattcaagctgctgtccatgacatgattcattctggcggcaaattgctacgtccagcctaccaactgttgttctcttattttggtgaacagcgggaccctaaaaaggcgacagcgttagcgrcttccattgaattactgcataccgccacgttagttcacgacgatattgtcgatgaagctgatacgcgtcgtggcttgccaacattgcgttcgcgctttggaaatagcacagccgtgtatacaggcgattatctttttgtttgctgtttcaagctcttatctgattattcttcttcattaaaaagcattcaattaaattcgcgcagtatggaaaaagtcctgactggtgagcttggtcaaatggacaatcgctataatttcgaggtaacgattgaccaatatttaaaaaatatttccgggaaaacagcggaattgtttgcgctaagttgttttgtcggtgcctatgaaagtggcacctcccaacgttttgccaaacgttgtggtgaaatcggcgaaaatatcggactggcttttcaaattattgatgatattttggactatacacaaactgtgacgctatcggcaaacccgtcttagaagacgtacgtcaaggcgtgtattctttgcccttgatttatgcacttgaagccaatcgtgaagtcttgttgccacttttaatgaaaaaagaagccttgaccgatgaagaaacacaggaaatttatcgtcttgtccatgaactaggtggcgtagaaaaggcccaagaattagccactcattacacagaaaaagcgctgaaagaaatcagcaaacttcctgaaacaaaggcccaagcgaaagaacaattgtatgaaattacacaaacgattttgacaagagaaaattaaaaaagccgctggatcctattgaggatttagcggctagctttttaggtgatatcttggtataataaacacgaagagagcgtactagacatacgctctcgggtagaccgtttaagacggtagcttgattttgatacggaaataaacccgtcaatccttgctaaagattatgacgggtttattttttgtcgtttttattactgattttgacaattaatgttgttacttatacaacttaactacttttgatgcttcattccatctctaatttgtattacctagtgaatacatgttatactaattaaaaaatggaggtgttagctatgacatcaacaaaaacaagaaaacaaggaaactcattagttataacaattcctgctactttaggagttaaagaaggggaagaatttgttattcttcgcaaaaataatggctccatcgcattgattccaaaagtagaagatttttttgaaaatactgctgaaggagagttttatcttcctgaattagcgattgattattcacctagcggaggagaagttgatgggctataaaccaactcaaagagatattgttattatcgactttgcgccttctaaaggttatgaaatcagaaaacgacgacctgctctcgtaatgagcaaagacagttacaatatttcaacaaatttagttattgtctgtccaataacctcgttggataaggaacgtccttttcttgtccctatttatagcgaaaaacttcatacctccgataatgcagtaagtaaagtgaatacgctccaagtctattcactcgactatacagaacaggcacaacgcagaataaaatatgtagatacgttagacgaagaaacattttacgaaattgctcaaaagtttttacaaaacttttcttttgctgtttaattcggcttcaactgaacacgcatatatgatttactattcgacttttccgtttcaacttgctataataaacacgaagagagcgtactagacatacgctctcgggtagaccgtttaagacggtagctttaatttattggttaataaacccgtcaatcttcgctaaaagttatgacgggtttattttttgtcgtttttattactgattttgacaattaatgttgcgaaagcaatcgcaagcatcaatgcttcaaagacagtcactactattcctttctagggaaagagcaaacaagcaaaaacattggcagtccccctttttttgagaaattgccaccgtcataaacttcctacttgtgtagtataacacatttgtaccttcctagaatacgcttactttcctgattattcaacagccgctttcttttgtaataaaaatcgcgcaccgtttactgggataaaacgattcagccaactaaaattttttagactaaacagaccgaccatcttttttgatggtcggtctgtttagtctattgctccgcctttactccttctccgacaatgctcgccagacatcaaatgtttgttttaagccttggacattatgaacacgtaaaatttctacgccttgttgtgctgcatacaaggaagcagcggctgagccaaaatcacggttggctggttctggttcgttcgttaaagcgccaatggttcgtttgcgagaaacgccgtatagtaacggataatcttggtagcgaaaggcgttaggatcttttaacagttgaaggttttctgcgacagttttatgaaagccaatccctggatcgaaacaaattttttctaaggaaagcccatatttttggcattgttcaattttttctgtataaaattggtgcaactcttcttttaaagaaagcgattggcgttttctagaatgcataatcacaacttggacttcaggatattgtgcgaggacttctgccatccccggagtgtctaatcctttgatgtcattaatcattgtggcgccagcttggatcgcggcttccgctacttcgggatagtaggtgtccacagaaatcggcgctagagaagtctcacgtattttttttattaatggtaatactcggtctgcctcaacttgtggagaaacttcttcgtagccaggacgtgtggattggccgccaatgtctaaaatatcggcccccgcttctagtagatgaagcgcatgttgataggccacgtcgaccgttgtgtagctaccgccatcagaaaaagagtcgggggtcgtgttgacaatccccataatttggtaattcttttttaaatcaatcattgtcacattgctcctttatctgctgaatcatctttcgtaaagcccgtattctaggacttatcttcattcgttcactcgtggacaactccgctaaggttttgcctcggtctggtaaataaataatcggatcaaagccataaccgcctgtaccgcgcggttcaactaattcaccagtcaaagtggcttccgtttgcaacagtttgtcgtcattgagtacatagaccaacgtggctgataaggttaactctcgggtcgactgttgcccttcaaataagtgcaacagttcgcggttctgttcttccggattggctgaatggaaaaagcggcttgtatgaatacctaataaatcaggaaaagcagttaacgttaagccgccatcatcacctaacactgggcggccaattaattgttggaaaaagcgagcttttagataagcattttcagcatacgtagtgccagtttctgcaggttgttcttgactggttgtatactttcgataagagacaagtcgaatagcggggtccttaagtcctgattgcatttcttttaacttaccttggttattcgtgccaacaatgatttccattttctaacgtatctccattaaaaattgatttttccactcttgttctttaaatagtccggtaaattgaaatgttttggtgctactttgtggtgttttcacgccgcgcatcgtcatacacatatgttccgcttcaatggctactgcaatgcctttgacgggaatattttcttggagtttgcgggcaattgtcactgttaaatcttcttgaactgtgggacgtttggcacaatgttctactaatcttggtaacttgcttagtcccaatactttgccaccttctggcagataagcgacatgtacttttccataaaatggcaataaatggtgttcacacattgaataaaaggcaatatcttttactagaaccatttcgccttcatttaagctatcaaataatttataatcgtcaaattcaggttcggttaatccactaaaaacttctgcatacattttagtacgcgtttgggtgtatcaaggagtcctgcccgttgagtatcttcccccactgcttctaagattgtggtaactgcctgcn

SEQ ID NO: 572 - DNA, 3807 bp; double-stranded, linear
canatatccaacaatgcttggaatctcctccgctttccagtgtaaaatgtacttgggtcatggtaaaagtccccctggggtatggtttttggtcgttaaaaaccatgtaccgtaaaaggactgttatatggcctttttacttttacacaattatacggactttatctaatgattccctaacagtattttacaattacttttntatttgccgcctttccccaataaggcggtatctttttgcataaaaatattgaattaaaatggtattgtctacgtacgcacttttggacattttcacatagatctcctttttaccgagaaggtggccatttttttgttgaaaattgaaaatgagtaaagtratattattatatattaagctataactataaccagtaagaactattttaccttaataagctagctcttgcttggaccattagctcagctggttagagcaaacggctcataaccgttcggccacaggttcgagtcctgtatggtccataaaatatttagtgagtaacaaggagtatttctcatttgagagataagccttgttttagttgtagtaatccacctttatatattcgaagttggatatcatttgaaaaccaaattagtgatactcagacttttttagttaatatcaaaatcataaaatctctatttgacagtgtttgttcacgaaaaaataaaaagagtgttcatttataacttcttgaaagaggaaggttatttgtcttaaatgaatttataggataacggttcttagtatagaatgtaaaaaaagccagccagtatttggctggcttctgtggtaaagcgcagccgttttccgccagttgcactttaggtgcgtgttagcacttgcttcaataaagaattaagaattactattattatgccataaaagaaaaactttgaatagatatggatagcaaaaaaccagtgaataaaattcgactggcaagatagattttggatagaattccttgaggaaaagttagaattattatgccaccatggaggaatagttgctatgatgttgctatcagaaattgattacaaaaagacaaaagtaatgttcatcgattataaaaaatgttgaattttacaacgtatgtgatgtgtataagtacatttgcaatctcctatattatttgatattccactttgtgaatgttaatggagcatagattaattggtagagcagcggtctccaaaaccatcagtataggttcaatccccattgttcgtagcattgctacttaaataaaagaatcgccaatagatgtttctgctgaattcaggatgagtcactagattgcaagtgttccttttttatttggcagaagaatgaagaattatgtataataacttttgcagaaaagtgaaaagataatggctaatctcttgaataaaggggtgatgcctatggttcatagctttatctctagatgtagtagacatgtctggattcgaaatattattgctaatggttgcattcgtaacgctagttttgctggggatagaccgtatgaacacaaaaaataaccatctcacttgacggggcgtagctggttattaaaactaatttatgacagtaaccgtctttttaacggttctacataaggatatgttaatagcacatttttttctatatatattataccatgtaacaaaataaattcattcaagattactcaacataagtgagtggtcttttttgtgaataaaaaagccactaggacagggaacctagtggtcagggtagcaaatattattagtcgtaagtgtacaataaaaataatttttataggaatatttaatcaacatcataatactattattataaggagttgctactcagaattattatatcaaatactaaaataattttgcaataaaaaagttatacactaaaaagccactaggctgtgggccctagtgactaggtagcaagcattttcaattggagttttacacaaaatttgaggattattataatacttatctgaatcgataaattatcatatatatagggagttgctacccaatgttattttagcagaaagcaatttactaaatcaagtacatagaatttagagaaagtaaagaaatacatatgttaacaaaggattagctagaaatgtggtgaggccatggcaaaatatacaaagtggctaactgatgaaggattaattaaaattgaaagggtgagcacgagagggtctcgcagatgaacgaatagtacaaaatattggggattaaaagaccaacctatgattgaaaaaataaatattctgacattactgacaccctaaaaagagaaaaagaagttgtagattgccaagtggaaaacgcactatttaaaagaggtgcaggctatgaatacaccgaagttacaaaagaactgacagaaaatgggataaaaatcacaaaaaaaggttacaaaacaattgaattatattgagatttaaggtttttaatggaaagcatgtcacttttaaatttttgatctgaaggcatagcatagaaaattattttagaaaattttgtgtagccaacaggaaagcatcaaaaacgcgatcttcaaaagtatgctgcatgtgttgtagttaacttattaccatttggtggcgttgtttgggatatacttaattgtgaaaatctaatgcaggttttaattaatccgttgcaatgaaaaaaaaattatggttatgatgttaaaatacttttagatgtagggaaaagaagtttaactcctgaacaatttgcaaaattcaatgctttaactattgcagctggtatagcaattactgctgtggcttattagggaattaattagttgagcggttatgtgagtatatacgattgttagaagaaaaaataatatcatttttaaagtttttaaaagttaaccctcagaataattgttttacatgttatagttattcacaccctattttaaatagtcttccttttagccttttggtgcagtgttttgagataaaggactattctgctttagggttggattctggatatttatttacaatagaagctgagraaaaatgctattatcatattgctaacgtaacaggaaatgatttttctactagaaattttttcgaacggtattgaaggaacmataaattgaataaaatactggaagaaacaagtgacatacgaaatattattatattaatagacctaatgggaggaacacctgcaaatgtaactatgatcaaagcaagtatggatagamgaattcaagtagtaactggaatgaatctaagaatggtattagaatcttactttaaaattaatgaagaaaaacttgctgagcatttaatagaaataagtataagtagtattaaaatacctgagatacagattagtggcggagaagagtaattatgatgtaataatcttagcagcggtggggtgtgatctatatacaaatattaatatttgtgttaaacatttttttgatataagaatgttgtccaatcaaattctagaaatattttagactataaaatttattatacggggaaaatacaactttttagataaagtccgtataattgtgtaaaagtaaaaaggccatataacagtccttttacggtacaatgtttttaacgacaaaaacataccccaggagggacttttacatggaccccaagtacattttacactggaaagcgaaggangattccaaagcattantggaataattccggtaaagggatgacggttcctaaaaaaatattttaaccaacgggaatttaatccaccaat

SEQ ID NO: 573 - DNA, 1406 bp; double-stranded, linear
cgttgcacgtgtcacacatacttgnactttgcnggcactctttagaatccttgcnatgacaagatgntgattgctgtggtccgtgcacttcagataacgaggaagctcgaatgacngcgcttcccatcgtgacaacatcaaataattttttcgtccgtaaacggtttctaatcttttggtcttgttccacgttggcgtttgcgttcttcacgttcaatgcgtagacgttcgcgtttttcttcaggatttggatcactgatcactgttcctgcttcaatttcttctaacgcacgacctacactttttacagaatcaaaggattcaacggttggttgaacgccttcatctaattcatgcgcacgtttgcttgctaaaatamccaaagaatatttkgaagggacttcttttaacaatgagtcaattgacggttttmacatcataaggctacatctcctctaacattttaatatattttccaattacacggtcaacacggaagtgctncactcgcgataatgtctttaattcgttgcacggctraaggaacttcatcattcactaccgcataatcatacagcgccatcatttcgatttcttctctggccacagccattcgktcttcawtcacagacatttcgtctgttccgcggccaataattctkgattttaattccgctaaatcggggggtgtcaaaaagataaatacgccatcaggcactttgtctttgacttgtttagccccttggacttcaatttctaaaaagacgtctttgccttcatctaacgtctggttaacatacgttaatggtgtcccataatagttaccaacatattccgcatattccaacatttctccagcttcaatcatcgcttcaaattcttctcttgaacggaaatagtaatctactccatccacttcgccttctcgctgtttccgagtggtcattgagattgaatattgaaaatcattttcttcactgtcgaaaatagcctttcttacagtccctttccccactcctgaaggacctgacaatacgattaataacccgcgctctgacataacgacttcctttcaaaacataatttcacagtattagttcyawtttgcactttttttctgcaattttcaagacttycttggagattcactgaaaaaatamcatttcttctttaatttggctttcataacttgttctttttttaaacaaattacctagaattcctatacaggcagccattttttaagtaaaatgaagtgatgactcctttaggatgaaaaaacgtgaataagaaaggctgagaaacatcgcacgaattaaaccatttacattgtttctgctaggcttagttgtcagttgtggggctnttttgcccaacctactgtgactcacgcagaagagatatac

SEQ ID NO: 574 - DNA, 564 bp; double-stranded, linear
cattaatcggcctacacacccataangccntttctctataagcagtaaacgccctaactgattattttacgktgcgtatctgtgaccaattaggttatataataactgttggtacgttccttttccgttgatccatcacccataagccagattgatttttyccttgaatagktcccgttaatcgcatcacttattacctgccataacagagtagttatttgtgcatctccgcaagcaatttcgttcaaccagctctctacatcccaatcattaaatttaggtaacgacggattttctacatatgcggttgcaatttttgatgtgaatacataattgggcgtaaacggttctagttgtttcgttttaaggttaaataccccgtttttcactggtataagatatcttgagaccgttttaggctttattttagcttctttccaaatgtgaaaaataacatcatttacsgctcnagcattggggttcgggtcagccacccaatcactcggttaattgggttcattggggaaaaagcctctttggcgaacaagcaacgngattctccaa

SEQ ID NO: 575 - DNA, 601 bp; double-stranded, linear
aactatgctgagtctagggttattattaactgggtgcggactcaaggaggcacaactgaaaaatccagcgaacgaattagtaacaaaccagttaaaattgtcgctgttggttccaccgctttacaaccgttagtagatgctgcgaaagatcaatttacacaagaacatcctaattatacagtttctgtccaaggtggcggcagcggaacaggactttcgcaagttgcagatggcgcagtgaccattggaaattccgatgtgtttgccgaagagaaagatggcgtggatgcctctaaattagtcgatcatcgggtggccgtggtcggtatgggaccagtggtcaacaaagaagtcggcgtgaagaatttaacgaagcaacaattgattgatgtctttactggcaaagtcaaaaactggaaagaagtgggcggcaaagatcaagaaatcgtcgtaataaaccgcgcaaacggaagtggcacccgagcaacatttkaaaaatggggcttagatggagctaaaccagttcmatcacmagracaagttcttcgggacagttcgtaaaattgttgaacaaacaccaggagcatcagctatttagctt

SEQ ID NO: 576 - DNA, 708 bp; double-stranded, linear
tcatggaaactgcaagaaagcntaanaaattcctgaagtggaaagaattctttagacttttctcgttttaatttaacttttcaataaaccacgatcattttgacaatttccgcatagaacatattgccaccattttgataaaggtaacccccattgtaaactaacgcttgccaacgataataacgatatttcgtattttggtcatttcctagcaacggtgaaaggacttctcttgaatattcttctgctaactctgtcgtgtgtttcccgccgcgttctttaacaaactgaatataatccagtccataattatatgcttgtacgcctgtccactcatcacagccagcttcttttgctttcgctaacgcttccgcgagaaatttgacgccatgtgcgatactttcctctggtgtttcaatcacttcttgttgtccataaacactttcactgctctgcataatatcgccagatttccctttagattctgtatagataatcgctaaagctaatgttttgtattcaggtattttattttttttgacttctgcttctacttgtttttcaaaggtcattaccgtttcaacattttgatgtattttatagccaagatagccaagaccagcaactaaaccaacaaacaaaagtagcatgatttnataaattatttntcttactctacgcatcgaatcatccaaactttttctttta

SEQ ID NO: 577 - DNA, 3656 bp; double-stranded, linear
ttgaaaaaatcacaatttaatgatttatccattacggagatgcacacaatcgaagcaattggtatgtacaagaaaaaaacgtcttcagaagtagccaaggaactgtcaattaccgtcggaacacttactgtagcgattaacaacttagttaaaaaaggctatgttgaacgtttgcgtagtgaagatgatcgacgtgtagtaaagcttggcttaaccaaaaagggaaaattactttttagagtccatcagcattttcatcgtgaaatggttaaaaacattttgaaaggcatggagcaagaagaagaacaagcgctgttaagagcactaaaaaatcttcatgatttcttgcaagaatacaaataaaaagtgaggatccccatgaagaattatgcacgaattagttgtacaagccgttatgttccagagaattgtgtcacgaatcaccaactgagtgaaatgatggatacctctgatgaatggatacattcgcgaacaggcattagtgaacgtcgcatcgttacgcaagaaaatacgtctgatttatgtcatcaagtcgcaaaacagttattggaaaaatctggaaagcaagcaagtgagattgactttattttagttgcaacagtgacaccagatttcaatatgccttctgttgcttgccaagtgcaaggcgcaattggcgccactgaggcctttgcttttgacatcagtgcagcgtgttctggttttgtctatgccttaagcatggcagaaaaactagtcttaagtggtcgttatcaaacaggtctagtaattggtggcgaaacattttccaaaatgttggattggaccgatcgctccacagcggtgcttttcggtgatggggctgccggcgtcttgattgaagcggctgagacaccgcattttctaaatgaaaaattacaagcagatggacaacggtgggcggctttaacgtcaggctacacgatcaacgaaagtcctttttatcaggggcataagcaggcgagtaagacgctacagatggaaggacgtagtatttttgattttgcgattaaagatgtttcacaaaatattttatcactcgtgacggacgaaaccgtggattatcttctactacatcaagcaaatgtgcgcattatcgataaaattgcacgtaagacgaagatttcccgcgagaagtttttaacgaatatggataaatatggcaatacctcagctgctagtattcctattttgttggatgaagcagttgaaaatgggaccttaattttaggttcccaacaacgcgtggtgctaacaggatttggcggcggcttaacatggggctcactgctcctaacgctgtaaaaaactgttcacatataaatgaagaaaatgactattttggaggaatatacacatggtatttgaaaaaattcaagcaattatcgtagaagaattaggaaaagatgctgaagaggtacaattaactacaaacattcaagaagaattagacgcggacagcttagatttattccaaatcattaacgaaatcgaagatgaatttgatgtgaaaatcgaaacagaagatggcatccaaaccgttcaagatttagtaacatatgtagaaaaacaacaagcaaactaatacatgaaaatagggggctgggacatttaattgctaaatgacccagtccctaaaaaaacaagtaaataagccgtaaaaatccttttttacttgaatgaagtgtacttatcttagaactaaaggacgtataaaatcaatgaatcaagagttatgtgagttgcttggaatcaattatcccatttttcaaggcggtatggcttgggtagccgatgcttcattagcaagtgccgtgtcaaacgctggtggattagggattattgctggcggcaatgccccaaaagaagtcgtaaaaaaagaaattaaaaaagttaaagaattaacggagcaaccctttggtgtcaatattatgttactttcaccttttgccgatgaaattgtcgatttggtttgtgaagaacaggttcctgtcgtaacgacaggtgcaggcaatccagccaaatacatggctcgttttaaagaacataacattaaagtaatcccagtagttccttcagttgctttagcaaaaagaatggaaaaaattggtgccgatgctgtcatttttgaaggaatggaagctggtggacatattggcaagttaaccactatgagtggcttaccgcaaatcgttgacgctgtgtcaattcctgtgattgcagcaggtgggattggtgatggtcgtggtatggctgcggcctttatgttaggtgctgaagcagtccagttaggcacacgttttttaattgccaaagaatgcaacgttcatccagattataaacagaaagttttaaaggcacgtgatttagatgcagtaattacctgtcaacattttggccatccagtgcgtactttaaaaaataaattaaccgctcaatataatcaattagaaaagcaagaactccaaaaagaagtgcctgatttagaaatgtttgaaaaaattggtcagggcgctttgcgcaaagctgtcgttgacggggatatggattacggttccgtcatggcgggacaaattgccgggttaataaaaaaagaagaaacagcccaagaaatcattgattcactcatgtctgaatgcaaagcgattgtacataagatgaatcagcgttggggctaagtgaataattttaacaaaaaatgaggtgtcgtatgaaaacagcgattttatttagtggacaaggagcccagtatcaagggatgggtgaagaattatatcaccaagaagcgattgttcgggaaactttcgatgaagcaagtcatatcttaggttatgagatggcagaactttgttttactgaaaatgaacgtttaaatgaaacagaatatacgcaacctgctattttaacagtcagtgtcgcattttaccgtcttttgcaacaaaaaggactaacgcctgatgtcgtagcgggtttaagcttaggggaatacagtgctttggttgccagcggggctttgcgcttttcagaagcagtggccttggtccaaaagcgcggtcagtacatgacagaagcagcaccacaaggaactggcaaaatggttgctgttatgaatgctgagcgtgaagtaattgagaaagcctgccaagaagccagtgctttcggaattgtggctccagcaaattataatacaccacaacaaatcgtgattggtggtgaggttgctgctgttgatcaagcgatgacacttctcaaagaagctggtgtgaagcgaatgattccgttaaatgtgagtggccctttccatacggcgctgttacaaccagcatcaaaaaaattggctcaggatttagcaaaattgaactttcaaacgatgcaaattcctgtcattagtaatacgactgccgaaattatgccccaagaggcaattcaagcgttattggaaaagcaagtcatgtctgcggtacgttttgaagacagtatcgaaacgatgaaggctatgaacgtaggaacgatgattgaagttnggtccagggraaacattaacyggttttgttaaaaaaattgaccaaacaattgaaatgcaccgtgtggaagatgttgccacattaacagaaacg

SEQ ID NO: 578 - DNA, 412 bp; double-stranded, linear
ccacacttcascstcctgtataagaggaatcagattaaattctataaacatcttttaaatgtctttgctccaaaaaattgatgtctaatctttagaaatcattgtctatcagaattattcttaaaaagtttgatttttttaatcaagaaagagctaatttcttccagaactcatatcatcatattttgcaatggctaaacaactcaaaatcgttataccaagcaaacatcctataaacatgcctaacaaaaataaaaacatggttaacgccacctctacatgattcaatagacttaaataaaaaaaatgragtaatctttcagtattttttatatttttttacaaaagtagttaagtgtatttgaacatatcttttgaacagtaataataaagagtggtagacggagcggtt

SEQ ID NO: 579 - DNA, 910 bp; double-stranded, linear
atccatgactgtttatcaaacgtagctttacctgtagcctgttcttttcgttgctcgtttacttctcttgattctaatagttggaagctttctgtgacaacctcagttacataaatacgctggccttgttgattctcatagtttcttgtttgaatgcgaccagttaaaccgatcagagtcccttttgttgcataatttgctaatgactctgcagctttccgccaaataacacagttgataaaatctgcttccctttcattgttagcattggtaaagttgcgattaatggccaacgtaaattgacctacggctgttccactttgtgtataccttaaatctgggtcttttgttaatcgtccaactaatgtaacgttattaatcaagattatttcctcctactcctatagtcattaatattttcttgtatggatttaataaatcatgctatctaataactcctaatcattataacatgtgctaatctactttncttttattctactagtctgatttcccctcgcaatctctctttaaacattttattttctaactttgtattggactttttctttatggaattggacaagtagcccatgttcatatctttttttcttttgatacaagaagtttcctcgaccaattagataatcaagaaagctcttattatcccattttaaagaaaagagcgtccacacaaggacgcccactcctactataagaatcaaccaaaaattagcaataattgtggtaaaaaaattgattttagcgacaaatgaaataatcgcgaatatcaataagagaataaggataccaatacctacaaaaatttgttccaatcgaatgccgtttggcgcaaaaggcaatgctacccctttgatactgtaaatcttgtgaggttgtttaaattctc

SEQ ID NO: 580 - DNA, 787 bp; double-stranded, linear
cccngaaaaaaatattcagtttgatcagattgattacacaatgtacaaamcargtsccggtatccaattaatcaaamcatctgaatataataaactcgcaaaatttatagatgaaccaactttaacaggtgagaaagtagttaatttatcacaaaaagatgctccttctgctgcatcagtagatgtcaaatctgttcaattggcaaatgatcaagttttaaacattgataaaacagaagaaaccaatgtattaccgacttttggcggtgtggttgttatcccagatagtacctcaacagatggaatcaaagcggaaacagaaacaatttggcagcccaaagcaggaaccaatcgtgaagaattgataaaagcagaaaatattattggtgacaagtatcccatgttagtaggaacagctgcaatgtcggcagccattacgcaatattatacgccagttctttttgtcggactatttatcggtattgtgttctttgtttcggcgggtagtttcttatacttccgtttatacagtgatatgaatacggacgttgaaaaattcaagatgatttacaaacttggcttgacgaaaaaagaattgaagaaaatgatttaccaacaagtaggtattttattctttaccccaattgttgtttcatttattcatggagctgttgctttgaaagcaatgtatgctgtcttagatcagccaatgcaattagctggctgggaagttttaggcgttttcttattgattncaggtcgtttactatttaattgccagaacgtt

SEQ ID NO: 581 - DNA, 912 bp; double-stranded, linear
ttcccggggccagcaccagataaattatggatcgattaatgtcctaccactccttggatnttcaactrggcaatcatgatatgatttggctggctgcttatagtggttcactggcttgtttagccaatgtagtacgtatttgtgctcgctatggaaatttagatttgttagaagaacgttatgctatcgatttaaccgccttaaaaaaatttagtttagaaacgtataaagaaaatcctgcttttgcacccaagaaaaatccctatcgtgcgttaactgaagctgaaaaacaagtagcgatgcgtgtgcacaagccattgccattattcaagaaaaactagaaggccaaattattggtcgacgccctgattttaacttggcacatcggtacgcttagataagattcaaggggaaactattacttttgacgaatgtcgttatacattaattaacagctgtttccaaaccgtttctgaagagcaaccttaccaattaacacgtgaggaaaaacagataattgatgatttattaacgcaatttcagtcttcaccgcggttaacaaaacacatgcgctttctaatggaaaaagcttctctttaccttgtgtataatcaaaatttattgattcatggctgtctgcctctgaatgcggacggtacttttcaagcttatacatttaaaggccactcctattcaggaaaagctttagttgacttctttcaggaaatgttagaagaagcttacgctcagcctgctagtacagatgactatgcaacagattgtttatggtatctttggtgtggcgaaggttcctcattatttggtaaacgagctatgaaaacctttgagcgttattttctcgctgaaaaagaaacacattacgaagaaaagaatccttattactctttgcgt

SEQ ID NO: 582 - DNA, 1641 bp; double-stranded, linear
gaaatatcttgtgctttttgttcaagacttgcgcatcctgataatagcaaagtggctgctgttagcagtagccacttttttccaataaatagtttcatttcctaactccctaactttttttccgttttaaagaatactcaattttctttttttctaacctatcaaacgttaatccttcaacagctcgttcccattttgtttgttgttctgtacgtttctttgtactgtctgcatatattttttgtaaatctccattaaccatgagtcactcctccttaaaacggtaagtcatgatctgaaatctcaatagaactaccttctaaatctggaaagggttgttgcgtattgctttcctgctgcccaactggtgtaggattagaagcgttaacaccacgttgttgactaacttcttttgactctaacaattggaagctttctacaaccacttctgtcacataaatacgttgtccttgttgattctcatagttacgtgtttgaagtctacccacaagaccaatcaatgttccttttcgtgtatagtttgctaaagtttctgcaggtttacgccaaatcacacactggaatatagtctgcttcacgttcaccattttgattcgtaaaattccggttaackgctagtgtaaaagcsgcaacagctacaccactkgacgtataacgtaaatcacaatcttttgtaagtcttcctactaaagtcacattattaatcatttaaaaaacctctttctattatttttttagaagtgatagcaactggtactatcacttctaaatatttactgttttactaaaccaccaaacatatttttaaacttgatttcaccaaactctgaaaggaacggatccgtttcgtttaagccgtaagtgtattggtaattctctacaatactttgataatccatttcccagtcctcttcatacggagatatataaaacaagtacaacattgttatatcccccatatacttttgttcaatcgcatagtatacaagtatattgttttctttctcgataatttcgattgctttttttcgttcttcgttgatccaatagttggcgcctagatatgattttcccgaaaaactaatttttccttcctcaataaattgtgcaattgttggttcatgaatacctaaaatcttcattctttttcttgcttccattttcattttttctaaattcaattgaatccctcgtttctgtttatctttataatcattataccatacattgtatacaatgcatagtataataatgaggaatattgacaaattttggktttttatatactatattttgtatagtatatataggagggtaattcaatgaaagatctttctcgtgaagaagttttaacttatttagaaaacaatgtggtagataaacaaggtgctgcaaaaattacaggccaatcattaaatgccttcacacaatccgtaaaattgaatgcaattaagccttactttgaaattaaacatgtaaacggtgaacgacctactgtacgcttgtatcacgtagacgatttaaaggaatacgcaaaaaataaacgaagataaaagagaactcccttcttttattctcgtttatttttttatataaaatccttagtttattttangacta

SEQ ID NO: 583 - DNA, 932 bp; double-stranded, linear
tgtgcccgaccattacgagagagcgcacacgatgctgccatggccgattgaatgaaaagacgngcagnttcgttttgataccaggaactggagagaacggnacagcaagtgaagaagtggctagaggaacaaattggaaagaagtgaatatttttttaatggcgtaaaatgttttgaaaatttcagaaaaaacagtgaaagtcttkgtttttattaaaaaatggcaaagattcaacgaagamccagttctaaagrcctagtaatagcgcaatttcatgttataatataggcaacaaaaattatacagaatagaagaggtgaacgttatgcgttgtccaagatgtcatcataataattcccgtgttattgatagccgtcaagcagatgatggacgtgcaattcgccgtcgtcgtgaatgtgaaaattgcagttatcggttcactacatttgaaagaattgaagcggcgccattacttgtaatcaagaaaaatggggatcgtgaagaatttaatcgtgataaaattttgcgtgggctcattcgctctgcggaaaaaagacccgttgctatggaacaaatggttcaaattgtcgataatgttgaaaatcgagtgcgtagtttaggggaaaatgaagtctctacaacgcttatcggtgaatatgtgatggaagatttagtcaatctagatgaaattgcctacatccgctttgcgagtgtttatcgacaattcaaagatatgagcgtgtttttgaaagagttacaggacattgtcgacaaagcaaaatcttcttctcctgactcagaaaattaaaaaggaggtctttctttgaaaggaaatcggcaaagaatccaaccaaaaaatatttttcaagcggttattgattcaccgctttctgatcaagagaaagaggttttaaccttttatatcaaccaa

SEQ ID NO: 584 - DNA, 771 bp; double-stranded, linear
taaaccgacagcacggcctgaaccgttcatcaaagcaaaagcgacaaagataaaccagatatttacccaatagaacatgccagataaacagaaggcaattgttaaaccaattgtagcagcacttgataaccaagtgaataaaccagcaatcaatgctaaagcaatacatacttcaacgattgtcatgaatttttgcatgaacaaagcaacttcttggtttggcatcataaatttcattacgctttcgaaccatttaggcatgtgatcaaacacttgcattggtgtttcgccgtaagcgtagcttaaaccaaagtgcgctgcttgtgttgccgcatcggcaccaccgcttgccgccgcatccgccgcaccacttgcagcagttgttgctgtttcagttgcttgagaagcacctgttgttacttgttcttgtaaccaagggaatgggaaaacgactttatctgtgaaccaagaaccgtcaccaaaccaagtgcttggtttcaagtaatcgccgttgccgacaattttcttcattgattcgactaaccaaaccataccatagaagacacgtagcggaacactccacaagacattgccgtaacgagacgtatgtccgcgagcaacagaacgatcatctttaatatggaagatttcgtgcataatgtattggaacatgtagtaaccagaacgaatatcaaagaagtatttcaagttaacgatatgtttcataatgatggctaagaaaccactcaaatgaattttatcgaataagtt

SEQ ID NO: 585 - DNA, 623 bp; double-stranded, linear
tttctcttaaataatgaaaaaagtctgatttttttgcaaaatagtgattaaaagtcaaaaatatacgctcttaaatgtcaataggacctttaagagcgattgttgctttagttttgtccttgaattttttctaataattctggatcaaatgtttgattttttaacatcgcaatttcaaagccgtaaggggcctttttattttttttgtcttctccgacataaggtgtttctaaaatttttggtaaagcagttaatttttcatggtgaaccacaccgtttaaagcttcaaaaccaatagtgccaaagccaatattggcatgacgatctttatgtgagcccataggatttttagaatcattcacatgaataacttttaaacgatccaatccgataattttatcaaattcaactaatacgccatcaaaatcatcttttacattataacctgcatcattaatgtggcagtatccagagtgacagaaagcytatcatttagcgtaactccgtcaataatcgcagctagttcgtcaaacgtacggccgatttcggttcctttaccagccatggtttctaaagcgatttgagggatttgctctttccncaagacttcgtttagaccttta

SEQ ID NO: 586 - DNA, 1253 bp; double-stranded, linear
ccgcctttctctaagngtaaaacaagccaatgtttcatgtgaacattggcttgttttacttactataatcatcgcactttatttgycgttctctgcggtagtcgtattcytggatacggggacttaaccaaccttttttggctgtttttcgtaattgatgatcaaatctccctggtggtgaactatctagtaattcatgggtacgattattccgatttgcataattaaacgattcaccattcaagactttttcctggtattcattgtttttggccgcttgataataagctggattactaattaatctgcctcgccagtcttcaactaacacatcccactggggtcacaaaggtcccttcttccattcaaaataaactcactgtgaaaattaggtgtcaatcgtttcttattaattaaagaataagatgccccctcagggtatttgttgtgcaaacgagcagagctttttttcagcttccgcccacccatccccttgcggcttggccgcaaaaacatagcgttttaacgcctgttcatcggtgtccccttcttgtttaaaaaaatcgcggatatacgtgatattttgacgatcaatatacattcttaattgatgtatctttttcgctttctcttggttaaagctcccaagaagacctaacggataggctttttgaactgtttttgccaacaaatcccaaaacgtcgcatgcggtgcaaccgtcttcgagaaacgataaggtcctactaattgcaacatgccatgctgatccaacactgcacctaattgccataacagtaacgagagcttttcttgcggacgataagccgaaaagcgaaataatcgctcatacgctgaagagcccacttcttccacttcagaaaacagttccgcgactgctgttttcgcttgctcaagtggcaagaaacgcgtgtcttttatggcgctttccactaatccataaacagcttggcggtcccagccagcgtcaatcgccgcctctacaccagcactcattgcttgttgtaattcttgccaacgtcccatcttctcgccgccttttcttatatacttcttctataatgataatcctttccccacaaaatgccaactgctttaacgcaaaaaaacaacccgccctttggggaagggcgggcggaggagttaaaaaaatgaaaaagtgttttgttaagggttttgtgtatcgggtatggttaaataatagccgttaaaatgtgaagaaactatggtaaaa

SEQ ID NO: 587 - DNA, 553 bp; double-stranded, linear
gtntcaatggtgattgaaggtcaacatttagtagaaaatgggttgttatatgtggcttatccganaaaaggcaataaaatgtatccaacctttgtccaccgagatgaaatttttccaacattacaagtaaacgaggcagatgggtatattaaaggctcaaccttaaaatttaatcgcatggttagtttagatgagacttttacggttgtcggcatgaagaatgttcttaaaaagctagcgaagaatcagaccagttctgctgttggggattatgttcaatatttaccggaaattgaagcgttggtacaaacagaaccagctgctgcagcgacattcgctgcattaacgcctggttatcaaaaagagtgggcgcggtatgtatttagtgcaaagcgagcggagacacggaaaaagcggcaaactgaaatgttagtcattttaaaagaaggctataaaaccmaagcgcttatcagcmaaggargaataatggcgcagtcaattgaaacagttacagcatacatcgaaacagtggaaccaaccngncgantgncta

SEQ ID NO: 588 - DNA, 576 bp; double-stranded, linear
aaaaaatcgtcgcatatttttcttcgataatttcagctaagcgttttcgaaagtgttcgttgaaattattgtccatgatagttaagaagaaagatttgttctcttgaatattaatatagagttgcgtcagaagttcttcaatgtgcttcacgcggacacggttgccattaaccagttgttgcgaatcaagaatagcggtaaaagcactaagcgtaaaggtgaagattgcatcatataaatgctgtttgtctttaaaatgagcataaaaagtcgcacgattaatcatagcttcatcagcaatatcctgaatcgtcaccgcttcgtagcctttcgtttctacaagtttaaaaaaagcttcaataatcatttttctggttcgttgtactctaaggtctgttttctttgccatcataaattcctttcgagatagtcaacattcgcgggaaactttgtkgttawctcacaaaatagggtaaatkgcytgttgcaaatcatttagaacctttctaaaataggtatatcnatnataaccaacagtttgtntaataatccaccaactgtggaaaaatgangggg

SEQ ID NO: 589 - DNA, 658 bp; double-stranded, linear
gagcctgtgactgttgaggtamacgttcaacttctcttgaatgataatcatttgtctctttgattgcttccgttaactcacctagaggaaatgcagttggccatttcaactgaaatgggcgatctatataatcattataaggtgtaaattcttttttagtttttttcattggtttatcctccaagaccagtgttgccaccagcgtgaccaccaactaatccggctcgattcacagctgttgctccatctaaaagagaagaagcgtgaatcaaggctttgaagccaaattttcgacgtattttatcgatcaaaaaatctaattgggtattaataatttgttcttcaggaggggagaagagatccaattgaagtgtggtatcccaaaccagctttccmaaggagactcctaaatttcgaatatccataccaggaacatagttttctcgaaaaagcttcaatacatgttcggttaacacttttgtgttgttgctacgagcgattttaagctgttttcgccaaccagacctgcccagtccatcaacttgtcctttagaataaccaacaaaaattgaaacacactcagtttgacagtttgaatttctcaacctggttgctacttggtctgaaagttccttcagcactaattcaatttgatctc

SEQ ID NO: 590 - DNA, 940 bp; double-stranded, linear
aaagaatctatcaaatagtagagaaatatggatatatagaataaagatgtagcatatagttatgcaattctaaagaaaaagttttgtcaggagtaaatcaaaaatttgaacttgggaagttttatgcgatagtaggaaagtcaggaacaggaaaatctacacttctttccttacttgctggacttgataarcctcaaacaggaaaaatattgtttaagaatgaagatatacaaaataaaggatatagtaatcatagaaaaaataatatatctttagtatttcaaaactataatttaatagattatttatcaccaattgaaaatattagattagtaaataaatcagcagatgaaagtatcttgtttgaactaggtttagataaaaaacaaataaaaagaaatgttatgaaattatctggtggacagcaacaaagagtagctattgctagagcattggtatcagatgctccaataatactagctgatgagcctactggtaatctagacagtgttactgctggagaaataattaatatattaaagacattagctaaagatagaaataaatgtgtaatagttgtaacacatagtaaggaagtagcagattctgcggatatcattttagaactaagtggtaaaaagttgaaaaaagtaaataaaatgaatttggaggttgaataatgataaaaaatgcatttgcttatgtaactagaaaaagtttaaaatcattaattatcatattagttattttatctatgtcaactttaagtctcattagtttatctattaaagatgctacggacagagcttcaaaagaaacatttgctaatataacaaatagtttttctatggagwkaaatagacagtaaatccaggaaccctagaggtgggggraatgtaaaggtgagatttaaaagaatctcaacngatagtaagactcc

SEQ ID NO: 591 - DNA, 1268 bp; double-stranded, linear
tgaaaacgactaggtgattcaaactttctgaaattctaaattgaatcataccagaagaaactggccgaaccaataaagtaaggacaatatataagcccataatgataccattggctaagactgttcttagctttcgattggcttgaaacgaattttgcatactttttccttctttctccgagtttttttacaagggatggttgatgaaccttggttacaattgcaacagttcacattctaatatggaaagtcaaaatagtcaatgaaagccctgttttactttgcacttatttgcaggtttcacctctcatgcattgtttcgtgcctttttctagtcattttttacttttttaagcaatctttattcgcagaagttcctccctctggtataatggacaatagcgattcaaaggaggagctcaatgaacattcactactatcttattatcaacgagcaggcaagtagcggcaatggccgaaaagtcgctagaaaagtgattcaacaactcaagcaacaagaacttaaatatacggctctttacactgattacgctggacatgaaaaagaattgacgaaggaacttgcagaaacaactttacttccttggtctgaagacttagacgtttcaacttttccaatcctagtcgtgctaggcggcgatggcacactacataatgtcattaattcattacttccatatgattcaactattcctttaagctatattccatgcggctctggaaatgattttgcacgaggggtgggattatcaagaaatattgataaagcattgcatcaaatcctgcgcaccagacgaccaaaagaaattcaaacaattcattatgtagaagccaaccaagaagaaatcggcttagccaccaataatgttggcttagggttggatgcggcaatcgtggaaaaaaccaacgaatcgtcatcaaaaaaagccttaaataaatttaagcttggctcgctttcctatatttcttcaatcatcatgtcytttttagacaaaaaggcttccaattttagttgaaatgaatggkaaacaatacmcattwaatcgtgctttcctatgkacggtcacaaatcatccttawtttggcgggggcgtgnnnattatccgacggccaatcctcgcaaagcagtcgtggacttagttgtcgtggaacgaatcaatatttttaaaattttgtggcttattttcctaattgtcgccaaaaacaagggaaatctaagcattttcatcattttcaatcaagcaaaa

SEQ ID NO: 592 - DNA, 1011 bp; double-stranded, linear
ggatgcttcagctctaggaccgatggaattattcatgtttttcggtaaacctacgacaaatttcgtgacttcgtattctttcaccaattcacctaatcgctcaaaaccgaagttctcttcctcttcattgatgcgaataatttcgatgccttgtgctgtccaacctaataaatcactaacagccacaccgactgtccgtgaacctacatctagccccatgatcctcatttgatatcgattccgtggttcgctaagtaatatttggttaattcttccatgatttcatcacgttcatgacgacgaattaagtttcgagcatcttgataacgaggaatgtaagccgggtccccagaaagtaaataccctactatttggttaataggattgtatcccttttcttctaatgcccgatatacggtttctaacgtttcactgattgctttttttcgattatcatcaaaatcaaagcgtactgtttcgtctgtaaaacccattttactacacctcacttctacttttatacaatttcattttactagaaaagaaccgaaactacaaacaaaattcttctccttctctcttttttgktattcytagkcyttattaataaargcttcgkaaaaaaatgacagccatcgataattttaaaattataaaaacaaatacacaactttataaaacaagaataaaactctgctaaatcgccagaatatcacctttccctccaattcattttgcgaaaaaatcgacgtttttcttttaaaaacttttaaatatctatgattaaataatatcagccttttaatgttacaattcgctaacaatctgtttacgatgtaaattttcgattgcagctgttatttatttcctctttttggttcgtttgtagtacactagaagaaaatacataaagtgtaggcctgccgcanggactccgnctccatttggtttttactttttagtaaaccngtttgttagccgggtaaaaattgnggatcgtaaagcgatggc

SEQ ID NO: 593 - DNA, 839 bp; double-stranded, linear
tctnttttattctaagattgtctactaagcacttttgtcctagtagcgttttggtttctaactttattatttacaggggaagaaaaaataaagcacacctttactgtgattccaaaaatcacgtgtttatcataatatatttttgtttcaatcccaagtattctgctcacaaagtgtcgcttatttaataaacattgcatcgccaaaactaaagaaacgatatttttcctcaatagcatgttggtaagcagccaatgttaagtcttttcctgcaaaagcactcacaagcatcactaacgtagattttggtaaatggaagttcgttgaaaaagcctctacgactttaaattgataccctggtgtgataaaaatatcggtccagccactgtcagcctgaatttcaccattaaattttgtgccaattgtttccaacgtacgaatagaagttgttccaaccgcaacaatccgaccgcctgcttggcgtacttcatttaattgcttagccgcttcttcagttaaacgatagaattcgctatgcatatgatgttcttctatattatcaacgctcacgggacggaatgttcctaaaccgacatgtaaagttaaataaacgagatgaacaccttttgctttgatctcttctaatagttcttttgtaaaatgcaaacccgctgttggtgctgaagctggaacccattttcttcagccataaaccgtttgataacgatctggggccatctagacggtctttggatatatgggcgggcaatgggcattttctccctaaacggattcctaaaaaanttctaaggaaaattaccanncanaatttgaaattc

SEQ ID NO: 594 - DNA, 1180 bp; double-stranded, linear
cnattagatggttcctactacattcattatgagacactagcagctggtgtctcttttttatttgtaagtattagttacacttgaccgaacgttcgttctcgtttataatataaattgtaatccttatgattatatctactagaaagaagtcaagaaaaatgcttgtttttctgtcttctttttgatttaattattttagtaggtataattaatacggagtgtttattaaatggtaaacaagaagagacaagtaagatttgaatttttccaggtcaatggaaaagctcaagaaggagaaaaaattgtaaaaggacttttcgatctatatccattagctgataggataaatagtataagtaactatactgatagagatgttattctttttggggaaaaagttagaatggacagattttttgaggtttctagtagtccagaattatatgcaatgcattttactagattaagaaatgataaacctgcgtatgtagaattaaataatgaagttttgaaagaaattccgttaaatcctggagaatatattgctgaggatattagttgcttgtatgatagagagctatctgttttaatggtacaaagaaatattcatagtttgtcaccttcaggtattgragattattttactgaaatgagtgatgatttagtagagattgaattattgccagtkgtaaataaagagattattagtaangccttagctaatgaaaaatttcgtaaactagagttaagagcaggttctatgaatacaactagtgatagaagtggattgagaaaagtattaggtccttttatggaactatttgagaaatttgaaggtacaaattttgttatagaaattagttcagggagatcaaaaaaagatttatcagaagatcaaatgaaagaagtaataacagcaattgaacaagataagagtttatttagttcagcaattgtttcagcaaaaaaatcaaaagaggtacctgttgaaaagtatgatttaataaatggaaagctctatgtgtatcgttcttttgatttgccagatggtgcatttttaaaatcagatagtgttatagacaatattaaaaattattattttcatcctaatgaaggtgggtatagaaaacaaattatcgatgctgtaaaatagtttaaagaagagggtgagatatcctga

SEQ ID NO: 595 - DNA, 1434 bp; double-stranded, linear
gtagacctattcatctaactcaatatcattcacatagtnttttaatctnaggttattgtcttgaagattaggatgaagcctatcaatccccgagtcaattagagctatggttatatctttccctagttgttctttcactggatcaatatgagataaaatttttttatatggccaattaaaagacttaaaatctttgtttaaaatattaatgtttaaaatagaactattaacttcttcaggtttaaaatctggtaattttttcccttccgaaacattaaaatatttacctataaacttcctatcactatcatccaggtttttaaaactaactaatcctatttcctgtatataatctactttttcagaagataattcagactcaatttcttctatagcagttgtttgcgaattatcaataaaaaatgaaatattatttgagagatctgatgcataacctgttgttcctaatgttaaaaaaatatatgagattaaaatataagtcaatcctctttttttcattttgtacctccaaattgttgttttttgtaatacagtgaacgatataactcgctattttcaataagatcttcatgctttccaatacatactatttcaccattatccattaatataattttatcaaagtttctcaccgtactaattctgtgagcaacagtaataactgttcttttctcatctaataaattagaaaaaacttcaaattctgaaatattatccattgcagatgtaggttcatctaaaagtaatgtattcacattagaatagaacgctctagctaaagcaatcttttgcctttgaccaccagagaaattactaccattttctgatactatagttttctcatactgaggaattcctaaaagtacctcatccatttttgatttactcatactttcttttagtctttttttctcatttatagaagaattcggtttaaactctaaagaaatatttttttcgatagtttcattaaaaatatgcgcattttgattaacataaaaaatgtttcttctattattggagttgtttgataaaggatagccttcatacaatatttctccattagaaggttgtaacaatccagccaatagttttagtaaagtagatttccctgacccacttctaccaacaatagcaactttatccccttttcttatgtcaaaagaagggagcgtcaataattttgtgtaaataaattgtcctcctgcaaaataattagttactcagtaaacattgaaactaatgtatcggttacctgttgaaaacctttatggcttctgtttagaaatttttgattgtatgtatcaaaaakgctgactagraagcgktctagtgawtcttcattttgaaactgctcttttctacggctgtatcttttaatttgcttattgaaagactcgattagattggttg

SEQ ID NO: 596 - DNA, 1006 bp; double-stranded, linear
gtagtccctacagttcttctatttataaggyttctcgtttagacaagccacgttctaagattttttggcttctaagatactctgaattttctgtactttcagaaaaagacaactctgtttcgatctcctctgactcaatacaaatgagttctttgccataccattgtgctttatacaacaatttagctaaaaataaagaccaagccagttcagaacgatcatgttttggcggccgctcattactgtgatgggctttttcaatacaaataacatcgtaacttgaaaccaattccgttgtaattttgtttaaaatatccgttcgttggttggctattttttcgcgaatttttgcgacttttattttttgtttttgataattttttgcttgcgaaagatcgacacctttttccaaagcaatcattttacgcttgtttaattttcgttcttcttgacgtagtttttgctttaaatgctttgaacaatagcttttttcgaagctttcaccattcgaaagcagcgcaaatttttccctactgctacaaattcccaccattttttgttgctttgttttcgtttcaatcggcgcttcacacaaaatggaaacataataattgtgactcgcactcatagaaatagttacagattttawctcccccagcggttggcggtgtaccttcattttaattaaagatttcaatttaggtactttcaaataacgattatccaaaattttgaccgtgccatgttgattgttcgtagtgtaggaatgcaccgtttctttctttttcttttttggaaagcccatccctttttcccgataaaaatttttaaaggctcgatccaaataaacttgtgcatttgccaaggctaaactatcaacttctctgaggacagggtattgtntcttatatttagctggcgttggcattttaaacgtttgttgaggattttttcgcatctctttgtagakatcaatccgggcttgtaacattaaattatacaccaa

SEQ ID NO: 597 - DNA, 832 bp; double-stranded, linear
tggtaggtgaagaggtgataaggtggataaaagtatgaaaataaaatggaagcagaatttgttagtcgcatggattggttgcttttttacaggggcgagtattagcttagttatgccgtttattccagtatatgttgaacaattagggacgcctaagagtcaagtagagttgttttctggattggcaatttctgtcacggcgtttgctgctgcgattgttgcaccgatttggggaaatttagctgatcgaaaaggtcggaaaattatgatgattcgggctgcagcaggaatgacgatcacaatgggggcgttacatttgtccctaatgtatactggctgttgattatgcrttttatgaacgggattttatccggctatattcctaacgcaacagcgatgattgcgtcgcaggcgccaaaagagaaaaatggctgggctctagggacattatcaacaggtgcaattgctgggacgttaattgcgccatcgattggcggtgcgttggcacagtggtttggaatggaaaatgtctttattattaccggcgttattttatcattacaacgttgttgactatctttttagttaaagaagatttcaaccagttgagaaaaaggatttattaacgacgaaagaaatttttagtaagatggatcatgtttcagtattgatggtttgtttgtgactacgttaatttacaattaggaattacaagtatcagcccaatcttaacgctatatattcgtctttaagggcgatacagagaagtattatttgttagtggtttgatgttcgatgccggcgttcagcaataattctctccnaccttngn

SEQ ID NO: 598 - DNA, 1642 bp; double-stranded, linear
cttttgggacaatntgrtacctatrgcgccttacaattrgcacngtacgtttccmtgtcgcaaataatggcatccgcgtgcaacccccatgtggtagamggaatctatggcaatgatgaaaatggagctttaggaaaaattttaaaagaaattgaaccaaaagttttgaataaggtgaatatttctgaagaccagataggaattcttcaacaaggtttctataatgtggtaaatggaactagtccttttacaactgcacgtggtttaaaatcagacaagttttcgattgctgctaaaacagggaccgccgaaacgcaagcaacagatgctaatggagtaaaccatacaacggttaatagtaacttggtggcttatgcgccgtacgaaaatcctgaaattgcaattagcgttgttttaccacacttaaatgatgaagcttccaaaccaaatcaaacgattgccaaagaagttttagaagcgtatatggaaatgtacaaaaaataaaatttgtaaagtagaactactttacaaatttgcccaaaagggtagtcaaatgacaaaaaaaatggtatgatattcaagtctaagaaatctcttggaaagatcaattattagtaggaggggaaaacatgcgcgtaaacatcactttagagtgtacttcttgtaaagaacgtaactacttaacaaataaaaataaacgtaacaatcctgatcgtttagaaaaacaaaaatattgcccacgtgaaagaaaagttactttacaccgtgaaactaaataatttatttgaatatagcctagaatccttgctttataagggttctaggcgctttttttgttgttaggaatttactgatttagttattgatgtagatttgctattttaaaaatttacatagctactgaaagcatctgttgcttctttagtaacttcatcagaaacatgagtgtaagtatccatagttatttgtaaagaagaatgtcctaaacgttcttggattattttagacctaacgttatctgattcgaataataatgttgcgtgggtatgccgaaaaccatgacaaccaatagaatgtaagttagctttttctgccaatcttttagaacgttggtaaatgtcttgacttcgggacatggtaccatcaatttttgkaaaaatgagttgtgttttaaatccaccttttttcattaaagcttcatgctgtctaagtttccatttttttaagatataagcagtcttgttatcaaaagaaattttacgaatagaattgggagttttaggatcgtttatagtcaatccatttgtactgatagcagtagttttatttatattaactacctgcttttttaaatcaatatcattccaattcaatgctaaagcttcaccaacacgtataccagtaaaagaaagtaagcgaaaaatagcacagtctaagtcggcatagtattttagaactaaactttcttctttggcttgattggcaatgctatcagctgtatttaagaaatgttccagttcgtcttttgtatagaactttctttttgtatkcttttctaatttctktagcgaactaggtttagttattttcttaaatgggtttgagtctattatttctaaaccaacagcatagtcacaaacac

SEQ ID NO: 599 - DNA, 694 bp; double-stranded, linear
agtgatctttaccctttccgcagataccgcagccaaaaaagaactacaacggattcttttgcagtataatagaaaatagaaacgaaagaacaggcaccaacacaaaggaggtatttttatgaaagtcactcanctttctagtgaaacccttgaccgagcgcacgaacgttttgaagaaacacttgcgcaaatgaccgttgccgaagcaaacacgatgcccgcaccattaatcaagtctgttacttggctgatgtggcaccagccagagaattagacctacaaatttccgcacttaatcatagtgatccgttatggcttagtcaacactggacagaaaaatttgccttggatttgccagatgaaacagaagactggcatcacacaccagaggaagcggcgaaagtcgtggtggcagaaaagcaattgcttagtgactatttggctgccagtgtggcacttaccaaaagctatttagaccaaatcaaagaagaacaattgtcagacgtgattgataaaaattggaccccgccggtgactagacaagtccgtttagtttcagcgattgatgatgcatgatgcattctgggcaagccgtttatacacgaagattagtcattggaaaatgataaataagcaaaaaccaaaaatgcttctgcttaagcggagcattttttattgagagaaaaatacatan

SEQ ID NO: 600 - DNA, 759 bp; double-stranded, linear
aattaatttgacataaaaccaagtagaaagataacattctttatctaattcagttatatatcactttttttgcaggtgcttcaacagttaagatttcaatagaaactggactattttctaatataccytcttcttttgcatgtttcctacataaattattttttgtagatagtactcctatgtcctattgaaaatatttgtattataatttctgaatcacaaatattagccaatattcgataatttccaattctgtaacgccattcaccacttctatttccagtcaagccttttccatgttgacgaggatcagtagttccttctaagttttttctaatccaagctactattattcttgcctgatttctatccattttttttaattgtttctgcgcttgtggcatatatacaactttatatttcatttagtaaattctccatttcctcttgagaaataccaatctcttttttctctttggaaatttctattgcgttccgtaaggtttttaaatcaatttcatcttcaattttatctaatacagcttttcgataaagttcagttaatgaagaattatgagcttttgcatattctaacacaagttctttctcatcctcaggaattctaaatgtaattgktgattgagacatcttattacctccattcgcacttkgtaataacattgtattaaaaacaaggggatttggcaatacaatgttattataaatgtgatgatactccaatatatagaataaacatga

SEQ ID NO: 601 - DNA, 691 bp; double-stranded, linear
attcataaaattggcattaatattaatcaaatggcccgtctggccaatcagtttcatgaaatttcgtctgaagatattaaagatttgaccgataaagtacagagtttaaatgcgctggttcagagcgaattaaacaaattaataaagagaaaggaacaatcgtaaatggtgtatacaaaacattttgttattcatacatttgataaattaaacaatgcttgctcatatattgagaatgcagaaaaaactgaagtcacgaatgataatccgtctgaacacttggaacatttatttcaatatattgtgaatgacgataagacgtacatgaaaaaattagtttctgggcatggcattgtggatccaacaaatccttatgaagaatttaaattaacaaaattacaagcagcaattcaacgaaaaatcgggtacacattcgatccaaaatcagaacgattgcttccgccaacgttaacagaattagaaaaaggcaacgcgcttttagcacaccatttaatccaatccttttctccagaagatgatttaacgccagcaaaaaatacatgaaatagggtacaacacggtgatggaattgacgggtggagagtatgaatttgtgatcgccacacatgtcgataaagaacatttacmcaatcmtattatttttaggttccaaccaactttaaaaaccagg

SEQ ID NO: 602 - DNA, 3274 bp; double-stranded, linear
ttttacntcttctatgttatttatntctatattatctatatattcttcatagaaataggtatttctagtaacttttttaactatataaatatctgcctctaattctttatttaaaaattcaaaaaaatctcttaatttattctcgctattaatctttggcttgtatactatcttctttccatcagaaaaagttagtgtagaaacagtttttccgcgactatgagagtctccctgtgattctgatatagagttaagctctgaggattgtatgttaaaacaattttgtatgctaggtaaatcttcagtcactcttataagcatttgtttagtattatctaaaaaatatctcattctaacaacagtaatacgcatcaactcaggatagcatgtataaaaagctattatatcttttttagagttaaatcttttttttagataatagataaatcgcttgctactatcatttccctttagaggttcattttttttaaaagtatgcaaatctagcactaatgttttacttgttaagtgaataagctcttgtgttaaagtttctaataaattaataatgaattcttttgtacaaatatttaactctgagtttaaatcaagtaaaaataaacgagcatactgtaagaaatatctaaaaggataactagcatctacttctaataatttctcttcactatcattataagaatctaaaatggattcaaaaaaaatataccatgattgatctkgtaatgtattgaattgcamcttctttatcaggaaagttttcaataggtgttattcctaatccaaaattatccagtgattcatatttatatttaatcaagtagtctaaatcatcttgtttaagaacactttttctttctttccaagcttgtaaatttttaatgtcgtacttctctttaccactttgctttagtaaaaaacatctttcatttatgcttaaaacatttattaaattatcttccatgtaagcactccttttttatgtataagagggctagtttcactagccctcttaatatataaatkagcaaaatttagctgaaaataatgcacctactcctaagcctatggtaaaacatgctggagttgtctcagcctgaacatctccactaccttgaatcgcttccatttcttctaaacttaactcttcaaaagaaggaccaacaagttctaatttattagagtaatagttttcttgattttccttatttagcactgtgcttcacctcactaagttttatagtatattttaacaatgttttaaagacacaactacagttactccagtaaaaataccgccaccaacccagccacaagcagcactacttgctgcagctgtcgccgcaacagcacacaccggtgttgtctcagcctgaacatctccactaccttgaatcgcttccatttcctcaacacttagttcttcaaaactaggractacacttaaattttccataattcttaccctccatcataaaattgttgtatattgcataacataatatgttacaatttaatattatagagcttttaatcttttgtcaagtgacacttgacaaaaaggaggaatcaaaatggctatttttatttttttattggatatcatttctgtagtctacttngtttttaatctgantgattcaaaaaaagatgmgcgaattttatatwcaatttctttaacatctacttacatgtacttatttattaacttttccatacttatagtaattgctatttttcttttactacctaatgttattactaaaaactatctatttaattttatctactattacttctctctatcaatgatattgcactctctgttactactttttttcaacaagaggacttcataaatgataatcaataacttaaaattaattagagagaaaaaaaaaattagccaaagtgaattagctgctttattagaagttagcagacaaactattaatggtatagaaaaaaataaatataacccttctttacagttagcattaaaaattgcttactacctggatactccactagaagatatttttcaatggcaacctgaataaaaaagatttttaaatttcaccacagaatatttaaattaaaagaaaggtgcttcgtatgaagaaaaagtttatatcccttctgattttatttttaggaataattgttggcatagtaacagtttatattttaaagcataaataattatgactgttgttttatactttaatcataactgattttttatcagtaaaaccctcacttatgattacattcatttaaataaaaactaggctcaaatgtatagtaaagactatctctttttttgggggagacagtctctaaggttataacttattttagcctttcaattgccttgatattacttttatttcaagattatttaacatggacaaatacttctgaatcttttacataaatgtcgtggtaataattagatttcattaagtcactttcttctttattcaacgcgttaatatcaaagatctccatgttcacatttaagccagtgtacgttctaaataaaaactgatttggccaataaagggcttcatttggtggaaccagttcttttaatataggataattcttcgaactattgacaaatactggcgaatccttaaataaagaggtactatgcacggtcaccgtgtcacggttcactagatcttttaaatcaccggctaatatcatactttgtcgttcaaaagattccttttggtgacttaacgcactagcataaacaaatgtaaaagataaaaggtaaacacagaaaaggcaaaccgctgtttttgacacataacctaccgcgggttctgttgcaaagttttaaataaagaataaaatcccttacggtatctatgatttaagctgggattcccaataataccttgatttcagtacagaccgaaaacccgaagagagtaccttcttttcgggttttcttatataatcctcgaatggcttccatgcctttaatcgtggtagaggcagtgcgtaaacttcgatagaatttattgcgtctctttactggacgatggtcttgttcaatcaaattattcaggtatttaatggtacgatgttctgtcccttgataaaagccgtattcttttagtttcttaaaggcacttgtaatagagggggctttatctgtgactacaaccttcggttcatcaaactgcttcactaaccgcttaagaaaagcataggctgcttgtgcccgnttttacgnaccaat

SEQ ID NO: 603 - DNA, 2469 bp; double-stranded, linear
attccacgagccatagcagcatttgcaatatctgttggatcaccaattaagattngttctactaattcatcagattttaagcgggcagcagcacctaagattctaggatctgttgcttcagggaaaacaattttgatattacggcgtacgactttaaattttaagctatcgaataattccacgataaaccctccagttttatatttacaaaatccatcatacactattctcaaagaaaataacagttttttctagctgtattagtcaaaaaaaccaataatccgataaacttttcacaaactaactcttctacactataacagcatacactgttacactacactgtttcaggaagttgccaatcaatcggcgtttcccctaaacgttctagagcggcattcgcttgagaaaacggacgtgagccaaaaaaaccacgatgtgctgacaatggacttgggtgtggcgatttgataatcacatgccgagtcgtatcaatcattttaattttttcttgagcaggacgtccccataaaatgaaaacaacaggtttttcacgctcattcaacttttcgataatgacatctgtcagttgctcccaccctttacctcgatgggaataggcttgacctgcccgaacggtcaacacagtatttaataataacacgccttgtttggcccagctttctaaaaagccatggttgactggttggtaccctaaatcagcttgtaattctttgtaaatattcgcaagagatggcggcactttcacacctggctggacagagaaacttagtccgtgtgcttgattgggtccatgatatggatcttgtcccaaaattactacttttacttcttcaaaaggggttagttctarcgctgaaaataaatgatacatatctggataaatcgtttgtgtctgatattcttttttcaaaaattcccgcaattcttgataatacggtttttcaaattcagcagataaaatgttttgccaactattgtgaataatttctttcataatgctcactccttcgctctctaagcataacgaatttctccaaacctgacaagaaatttctgggtactttctcttggaaaaacgtggtaaactataggtaagctttaaatagataatgaggtgtagagaatcgatgattaaattaattgcttcagatatggatggaacacttttagatgcaaaaatgagcatcacaaatgataacgcttcagcaattcgcgaaggawacgtttaggaatcgaatttatggttgctactggccgcgcatataccgaagcgaaacccgcgttagaagaagctggaattgactgcgccatgattactttaaacggcgcccaagtgttcgacaaagatggacactcacttttcacggctgggatcgaaaaagamacagtaacagaagtactaactattttgagtcaacacaatgtttactatgaaatctctacaaataaaggtattttttctgaacatcaagaaaaaagaattgaaaactttgccgctcatattgcagaatccatgccccatttaacttataaagtggcgattgccatggcttcagcacacctatctttattgcatattacctatgttgatcgtttggacgacattttaaaagatgattcgattgaagtccttaaaattattggcttcagtatggatgggccgaaagtattaggtcctgctgggatggaagtagaagaactagatgatttggttgttacctcttctgcgcttaataatattgaaattaaccaccgcctagcacaaaaagggattgcagttgcgcgcgtckctaaagaacgtgggattcccgctgaacaagtcatgactattggtgataatttaaatgacgtcagcatgattcaatggggctggggtaagttttgcaatggggcaatgccgaactggaattaaaagaatacgctaaatatgaaacagccactaattagaaaaggtgttggcgarcatccgcgtgcaataagagaagatttgtaataagcactaccagttacagcactcatttatatatagaaaggagatcgtgtcgtgtctgaattttttattcaagaacaacagttaggaaaagttacgcgaaccatcgtgaaagaccaagcaggccgttcactttttctattggtggggcgctggggcacacgaggagatgcgctttctttatatgcaatgaacggagaaattttagccagtattaaacaagtttcttggacttttggcacacgatttgagttatatcagcgttttgaaaaagtgggtactctacggaaactgttcaatttgaatgctgatttctattatgttcaaggccttcactgggcagttgttggggatatcaaagcgcaccaatattcaatttatcaagtccataaaaaaatcatgtcaatggataaaaccatgctttgtacaggcgactattttgttttaatgttgtc

SEQ ID NO: 604 - DNA, 797 bp; double-stranded, linear
gaatcacctcagagttaattttgtcaaagcaggtttttcctaaaaatatagaaattacttcttttttaaatgtagtatttaatgtggagtttaaaaattatgtaatgaaatctagaactttgattttatcaagaactgtacgtgttatagaaggatgctcagagaatgaatatcagaattatagaagaaaattattaaactttgtagaagagtattatgagtcggaagaagtgtcaaaaaatatttcaaaatcttctatatcgaaatgggtaacaggagaataatagcatgtataatcacgtttatttaaaagaagatatagatgctttaataaatgaatttggaaaattgaatgctgaggatgaatctttatttagatttctaagtaaaaagattatattcttaaaggaaataaaaataagtatagtaaatactactgtgatattttatatagaccaaatgatatcggatttaatgtacttaatggctagttatcataagggtgaagtgagatatttttatttaaatattagatcagtaattgaggcattttcccgtttgtttagtgaggtagaaacaagtactaatagaataactatgacaactttattagataatatagctaactacattactttaaatgatttgcgtgatagtnaagaggrttctctggactatcctagactaaaaggtctttatagagaatgctgtctttacgtacacggaaatattaatgcnaaatattcattaattgagttttacaacgagttgcttaatgaagaaataactagtgctca

SEQ ID NO: 605 - DNA, 936 bp; double-stranded, linear
tctgcgttatagagcttaagaggtaatnatncaanatcattgcaatcaaggtggtancgcgagcaatcgtccttgactgcaatggtgttttttgtgtacacaatctgccacttaagagggtacaaaatataaatagttaattattaatagaaagtaggaaaatcaatgaaagaattaacaagtagtcaagttcgccaaatgtatttagacttctttaagtctaaaggacattcagtagaaccaagcgcttctttagtaccagtaaacgatccaacattattatggattaactctggtgttgcaaccttgaaaaaatattttgatggctctgttgtgccagaaaatccaagaattacgaatgctcaaaaatctattcgtacaaatgatattgagaatgttgggaaaacggctcgtcatcatacaatgtttgaaatgttagggaacttctcaattggagattattttaaaaatgaagcgattcactgggcttgggaatttttaactggtgctgaatggcttgcttttgacccagaaaaattatatgtgactgtttatccgaaagatacagaagcaaaacgcatttggcgtgatgaagttggtttatctgaagatcatattattgatgtagaagataacttctggggatatcggtgctggtccartggtccggatacgaaatcttttatgatcgcggcgaagaatttttagatattccagaagatgatccagaaaattatcctggtggcgaaaatgracgctawttagraatttggamcttagkgttcycyggaatttaatcatacaccagaagatacgtacgaaccattaccacataaaaacattgatacgggcatgggcttggaacgtgttgtatctatcattncaagatggcaccancaaattttggaaactgatttatttatgccaatncattca

SEQ ID NO: 606 - DNA, 890 bp; double-stranded, linear
gctgttccggttcttcctctagttccttggttatcaaaaacgatatctgctcgttcttttttcatttcaatcggccatkggctagcaattcgktgttgcgcttcttcttctgttaatggtttcgggccatcagacgctctttntgaatcttttctggtacatataccacagcaacttgatccatgatcgcctcataatgagcttcataaagcagaggaatatcaacaataacaagggcggctttctttttagcttcttcaatttgacgtaaaatttcttttcttaaaaaaggtttcagcgtttcatttaacaactctcttttttgaggactagcgaaaattaattgtcctaattttttccgatccaattcaccagttgttaatactatttctggtccgaaagtttcaacgattgcggctaaggctggttgcccttttgcaacaatttcgcgggcgataatgtcgccgtcaacaattggataacctgcttttttaaaaagagcaacaaccgtacttttacctgtcgcaatccctcctgtaatgcctaaaacttttgtcatttcaatcgacgacctttcaattgttggcattgtggacaataatgcgtaccacgttgtgccacttttgttttaacaattggcgtaccacaacgattgcaaggtaagcctgtttgcccgtagacattcaacgctacttgaaaagtccctgcttctcctaacgcgtttagataggtgcggatggtggttccacctgcttcaacagcgcgtgccaagacgtcaatgattgcttgatacaacgtagcaacttccgcagttttaaggaatctgctggttgttctggatggatttgcgcttgccaaagtgcttcatctacataaatattccccaaacc

SEQ ID NO: 607 - DNA, 1067 bp; double-stranded, linear
gccaacgttagggaaccaaccaaggcgtttnggaccaactttggaaaactgacggactaaaagggcctccngattatctaanggctaaggccntaagggaatccgaatcccctgtcattgtgtagccgtttaacgcaccatatacagagattaaaatcccaatagttacgattttgccgccaattggtccaaaaatagccacagaagcatccgaagctgcattcaaattcccagcgatttgctcaattggtaatgtttttagaaacacaaaattaattaaggcataaattaaagtaatcaataacaaaccaaaaataatggctttaggcaagtctctttctggtcgcttcatttcaccagccacgttacccacacccagccagccatcataagcaaacatggtggcgactaaggcgccactaaaagcaactaaaaagccagtattcgctgttgtttcaacaggaaaaagtgaaacagctacttgtccgggagtaaataatcctactaaagaaatcaaggcaattggaatcagttttactaccaatgtcgttgattggaccaaagaagcaatttttgttcctaataaattaattatcgtgatactggttcccgcaagaatggcaattggaatcaataaatttgccgatagatgaaacaaattgattagttgtgtactaaaaataatggataacgccgaaatgttggcaggataataaatgatactttgtgcccaccctaaaagaaaaccagctaatttaccatatgtatattcaatatacttcactgcgccacctgtttcagggattgctgtagcaagttcggcgctggttaatcctgcacaaatggttaaggcaccacctaacacccaagcaaagatagctaractagctgactgtgcgtgtccaacgacactcgcagctttaaagaaaacaccagcgccaatcaccgtacccattaccgtggataacgcaccaaacgttgttatctctctttttaattgctttttctccatrgctccctcatttcatttaaacttaaaaagcgtaacaaaatttccacttttttgg

SEQ ID NO: 608 - DNA, 791 bp; double-stranded, linear
tacccgtcgccaatggctgacaatggatatgatatttcagactattatggtatttctagcgattttggtacaatggcagacttcgatgaactcattgaagaagcaaaaaaacgaaacataaaagttattttagatttggtggtaaaccatacatctgatgaacatgcttggtttcaagatgttttaaaaaatcctcaaagtcgttttcgagacttttatattataaaagaaggacgagaagcacctacaaattggcggtctaacttcggtggtagtgtttgggaaaaattacctggggaagatgcctactactttcatgcctttcataaaaaacagccggatttaaattgggaaaatcctgaactacgcaaagaaatctatcaaatgattcgtttttggttaaacaaaggaattgctggttttcgtgtagatgcgattaattttattaagaaagatttgacttggacaaacttacctgctgatggggcagatcaattagccaaagtaacaaaagctagtagaaacatgccaggaatgagtgactttctgaacgaattaaaagaaaaagcttttgctggctttgatattgtcacagttgccgwarcggccggcgtcaattatctaaatttatcagaatttattggagaaacagggtatttcgacatgatttttgacttcaaatgggctgatttggawgtgaaatcaggaagcgaatggttttatagaatcgattggtcttggaatgatttacgcacattaattttcaaacagcaagaagccatgcaagangc

SEQ ID NO: 609 - DNA, 1243 bp; double-stranded, linear
aagacgacgttccaatgtgtaawtgaacacaacctgttttacagtggtgttgcctaatacggattgctacttgctcagcmatttcttttacgaccagtycgatttcatttcttctagtataatctcgtggtaacacttgtgaattgccataagatttttcctttgacggttctagtggtattgctatgtcagttcgatcaataccatttgcatggaagtacagctgtaacccaatcacgcctaaacggctcttaatggtgtatggattccaattagctaaatctttgatactcatgatccccatttggttgagcctttttttcattcgagaaccgataccccaaaagtctgtcatttcaggaatattccatactttatcaggaacattttgatacgtccattcggcaataaatccttcmttgktcttcgcttcgttgkctaargcaagtttggctaacaagggattatctccgacacctactgcagcaatcaatcctagctcttctttaatacgttcttggatcatttgagcgagcttctttctacgttggcttcgtgttccttcagtcgtaaaaagattcagtgatcgggtcacttttaagattgattcatcgatcgagtaaatcagtagatcttcatcagccacatatcttctgaaaatattatttacctgcatatttcgcttgatatatagtttcatacgtggtggaacaacatgtagtgttttaggaaatggttgtggtaaatcacgkggtctactcacatttgtaataccataccgctttttkgcttcaggagaagaagctaatatcaatcctgaaccagtattgtcacctcgactcataacaacaagttctgttgttaatggatctaaatttctttctatacattcgacactcgcataaaaagacttcatgtcgattagaaaataatcatttactggttctttcgaataatcaaacatgaataacaccccttctttttacattatacaaacgtatgttcgatattgtaaagaagaaatagctaaacacacaaaaaaagaagcgtaggtaaactcttaccctgcttcttcttttgatttgtatgatcaactcattgtatcactttattaaataatttgaaaatctaataaaaactctcactctaaaagagtgagagcctgcaaattagagtacggaattctttgagagttccgttccttaatattaacaaatggtcttaaagcatacaaggcgaatta

SEQ ID NO: 610 - DNA, 586 bp; double-stranded, linear
tagatgnaatntgaagtgactggtgaaaatcgacatatcattaatggccatacaccagttaaacgaacaaaaggcgaatcgccaatcaaagcaaatggcacgcttctcgtaattgacggcggcttttcaaaatcttatcagacaattactgggattgctggttatacattgttgtacaactcgtttggtttacaactgaccgcgcataaatctttttctagtaaagaaacagccattttaaataatcaagacattcattccatcaaacaagtcatcgatcgccccttacagcggctattggtgaaagataccactatcggcaaagagctattaaagcaatcgcaagcactccaaaaacaaatgaaacaaaaccagtagtgccgttaaaaagacgcttgcgctcttatccgaaaaatgattaaatggaggagttgagaaaaatatctattagagaaacggaaagggttttacattgaagaacagcmactctcactttacggcaccattttctttctttgctttntcctaattgtgggcttcttctnctcaagtcgtggcgaagattatgccaaagatctgaacaaaa

SEQ ID NO: 611 - DNA, 421 bp; double-stranded, linear
gcacgcrcaactttcaagcaaaaacgaattgggaactataaagaaacagccgattgttattctcttcaatcggctgtttctttatttatttgccttgtcatcagtgttttcttctgcagcaatccgcgcttgaacttgttgacgtaaagcttctagttctttttctttcttttctaattcagctaaatcttcagaaatttcatgggcttcttctgctggcttaggttgtaaaaagacgtttaaaccaatcgctataaaggtcccaatgaatgtatccaacacacgttccattgcatattgaaaggaatcgctttgcggaatacttaaagaaatcattaaaagtgtcgcagttgcagaaatgatcccagcattgttrttaatcccatcagaaacaacgatgacgataatgactaaaagtggt

SEQ ID NO: 612 - DNA, 687 bp; double-stranded, linear
tttttcaataaatagttataaagataatattactagaattaacgaagaatggaatcaatatcagtcaaaagagaccattaataaaatagtagagttggtagagagaatcttggggggattttgtgaaaagtaaggtacgcactgaatatattgggggattaccagttgacgtattaacacatcaagaaattatggatgacttagaaagttatctcaaagctaaagagaaaatgattgtmactagcgttaatccgcagatttcattgttagcatttgaacatccagaagttaagttatatttgaaaagagcaactcatcggattgcagatgggataggtgtggtcaaggcatcgaagctaatgggtgggtctattcgtgaaagagttacaggaattgatgtcatggataattttttagagtatgcaaatcaacataaggnacgaatcttcttgtmtggtgcaaagcaagaagtagttgaagcagcagctaaaaatattccacgaccatatccagggattgttattagcggtattttacatggctataccaaggaaaaacagcaggaattgtggaccaattaaccaagctgaaccaggttgctttgtagcattggtcnccgaacaagagtttttggacaacattgtcncctgacactatgatttagacgagcggncttgcgttactggn

SEQ ID NO: 613 - DNA, 889 bp; double-stranded, linear
cggcttgaattttttattcttctatagtagttacagcaactttggaaatcttttctacaaaggcatcaagtaaatcgacaactgcttgttgtgtttcgacttggttaatcgcaactttcactttggctgctcgcgagattccttttagatagtaagaagcatgttggcgaaactcacggaccgcaattttttcaccttttaaatccactaatcgttgtaaatgaacttttgcaatgttaattttttcagctggtgaaggctcaggcatcaattcacccgtttccaagtattctttcgtccgttgaatcatccaaggattgcccaaagcagctcgaccaatcatcacaccatccgctccaacatattctaacatgcgtttagcatcttcaggcgttttgacatcgccatttcccataaaaggaatggttaaatgctttttcacttcctttaaaacgtcccagttggctgtcccttcatacatttggacacgtgtccgaccatgcatagcaattgccgaagcccctgcttgttcggcagccaaagcgttgtctacagcatatagatgatcttcatcccagcctgttcgcatttttacagtgaccggcaaagaaactgccgaagagactgcgtgaaccatctcatgcactttattcggatccagcaaccatttcgcaccagcttcagctttaattattttattgacagggcagcccatgttaatatcaataatcgccgcttggtattttcttccacaaacttagcagcttccactaatgtttcgttatctccaccaaaaatttgtacacttaaaggatattcccgcttcatcaatatatagcatttgctaaggttttttggtntcttnattttaangcctttggtcactaat

SEQ ID NO: 614 - DNA, 995 bp; double-stranded, linear
tggtgatgactttgtttagaatacaagtaggattttgctacgaccgaaataaacatagccataatccccaagcctactgtagcataaatcatggtgaaaatttttcccaagtcagtaactggatgcacatctccataaccaatcgtggttaacgtcatgaaacttaaatataacgaatctaatggcgacaatttttccactgttgaataaaaaatagtcccactcaacaacgtggttgccagtaaaaagaacaaggcacgagtgtcttctttttttaagatacctaaaaaagatgaaaataattttttgacagaaataagtaaagatagcaaaaaaatgacctctttctattgttaatctcttcttaacgttagcactttttagatgaagttcaactttttaattggtgtggttaaagaaaatttatttttttgttatttataatacacttcatctaaaaacaacccttgtgcaggagccgtttcacctgcgccttctcggacttttgttgcgaacaattcatcaattatcgctaattctttggtgcctgcacaatttctaaaagtgtcccaacgaggatgcggaccattttatgcaagaaaccattgcccacaaaagtgaactgtaacatttcgccgtttctttcaatcgtaatcttttcaatcgttcgagtagtcgattttttggtttttttcaatgctgaaaaaccaataaaatcatgggtccctattaatttttggcaagcttgttccattttttcttgatccaacgctttgggaaagtgaaaactatgataccgttcaaaggcattaggaattgggctattccmaacatagtagctgtattgtttgcctgtggcgttataccgtgcatgaaaacgttcaggcattctggaacttctttaacaacaatatcgccaggtaaatatcgattaaaaaggataacattccggtgttgtaagtgaccagncgtttaaaatcgctactggaccacgg

SEQ ID NO: 615 - DNA, 461 bp; double-stranded, linear
tcaaccattgtcggcgccaatgcgtttagtttatattggcttttgttatctgaaacaacagactcagaggagaatggctcgctgtttcatgcagatttaattagtttgctggacttgagttgccaacaattagaagaagcttgctacaaattagaaggcattgggttgctagaaacgtataaaaaaacagatcgggaattaggagattgttatttatattatttaaaagcacctgaaacagccgctcgtttttttaaagatgaagtgttagctttagtgttatttaatcgggttggacaacggaaatttgatcaattagtgcaaaagttccaaccgcatcctactaaaacagagggctatcaaaatgtttccgctagctttcaagargttakgccttarrgragacaaattgtttccgaagcgaaccgrttgaccacgatccagraactttttctcaaaag

SEQ ID NO: 616 - DNA, 538 bp; double-stranded, linear
caaaatttgttaaaacgagatattgccagtnttttaagacaaatgcacggtttagattatacagatattagtgaatgtactattgataataaacaaaatgtattagaagagtatatattgttgcgtgaaactatttataatgatttaactgatatagaaaaagattatatagaaagttttatggaaagactaaatgcaacaacagtttttgagggtaaaaagtgtttatgccataatgattttagttgtaatcatctattgttagatggcaataatagattaactggaataattgattttggagattctggaattatagatgaatattgtgattttatatacttacttgaagatagtgaagaagaaataggracaaattttggagaagatatattaagaatgtatggaaatatagatattgagaaagcmaaagaatatcmagatatagttgaagaatattatcctattgactattgtttaggaattaacaatattaaaccggaatttatcgaaatggtaganaagaaattntaanagg

SEQ ID NO: 617 - DNA, 1164 bp; double-stranded, linear
gcaatcaaacgcgtacgtacaagtgctaacgcgaatgcgaaaaattcatctcaaacaaacgcaatgctacagaatcaagaaatttgaagaagctgtagctgctggagctgataacgtcgatgctttatacaacgaagctgttaaagctgttgatatggctgcaactaaaggtttaatccataaaaacaaagctaaccgcgataaaattcgtttaagcaaattagctaaataatgtgagatagaagttagcattcatgttagcttcttttttcatccaaaaatgtccaagtctgttttcacaaagactcggacatttttttataaaggtgaatcaatccacggtaaatccgttgtgagatgttgactaaataatttagtctcttctcgcaaagctaaacgttgttgtcgtctcgtttcataattggaacaaatcaacttttcttctgcagtttctgggacgactgccgctaattggaagtcactttcgggattcatatgagacggaatggctacaaaagttgtaaaacaagtcgccgctaaataacgctctccagttgttaaatcttctcctacaactttaacaaatacttccatcgatttatgatgcacgccagaaacaaacgtttcaacacacactgagtgattttcttttaaaggttttaaaaaattcaagttatctaaagatgctgtaactgcccctctccgacaatgtcgtgaaacggaaatggatgcggcgtcatcaattaaagacattaatttcccaccaaatagtgcaccaaagggatttaaatcaaagggraatacacgatgtgtttgaataactcgtgattctcgacaaaatttttctttcgtcattaacgattcctctactttcatttataaacttttccacgctttactttagcttactttaccattgatgcaatccttactttttaggaaacatttaaaaaataacaaatttgcaagtcccatttattcatttttaggaaagttgctgtataataataacggttaaagaacttttaaggagatggatacacatgaaaawtgcaattgctggtgccggcgctatgggcagccgtttaggaattakgttgcatcaagcggraatgakgtaactttaatcgatcaatggccccgcgcacattgaanctattcgta

SEQ ID NO: 618 - DNA, 989 bp; double-stranded, linear
attntcccattccttgtttcaataaagcactggaatctttgaccggacgtgtagttaactaaatatctattactaaactcttctttcgtcgaagtataccaatttctgtcaaatgtagagtaaaataagcattctctatattttttctgagcttttaaataataatctgaggtatcttctatccctatatgaatattcatttccctatagtctatatcatcagcaacataaaacgacaaatcattttccgaaaacataatagcgggtataaaatctccttcgccaaaagctcctaacagtccaggttccgataattgcattttagctttcataaatctaggtaaaaatatatcatcagtttctacttgtgagattgctctaagttccattgcgttaaagtaagccattggaatatttctatatatattacttaatttaagtgaaatatacacacttcctcctaaagtatgaactattataattatgaacaattgattattcataatattatgtttatttagtttttctactattaattctactctgctggttattttttctgtataatcaatattttcttctataccaccaaaaataccaaaagctataagtaatttatcattggcaatattaaaaattgcctccttatattttctttcatccagtaattttatagcaaaattattctcagcaattttttcatgtttcaatctcttaaaagactttcttatatcattccacatttcttcaaatacgtatacttcagatattattgtggcaattttactggataatgcgttagcgacagatgttatgtctaatataagtacgccttccccagtatccagataaaggcttagttaaaaagaggatgttggttttgggaaaatggtttttgcttttctaaatcaacatcttccttcantattggatattncatgtattccaggtaattngttaactaaaaagcaccaagtttccataaaacc

SEQ ID NO: 619 - DNA, 2013 bp; double-stranded, linear
attgatcagtgaatattatgttatgtancgnttctttaaaccaattgctcttgatgaaanacaaaatttctctagtgttcagctattccttaacctttttatatttaatgctttattcatgtttgttatgctaacaaactttcatcaagtttttgtaggaaaagaatttattatttttggtagtttcatgggtggaatatttacgatttgcttaaaggaacaactaaaagaataccagaagctaatgaatcaatttatagatataaagaaagaagtacattgatgaaaaatagaattagttagaacagccatgtatggtgaaatattgtagtatattacttgttaaggacgatgaacaggatgagtatcaaaaaatatttacttttttatattattagcacatgtgccattatttttgtttctcttacttttttctttttacctctaaaatcgattgattctaggagttatgaagtacttcatacgatatctcaatatggagtaatttctaataaagatgagtggaggaatattttagaattaacaagatacggtagaaaagtaactaatgtggataatttaaatacattagtatatggtgttaacaaacatagttctgtaaaacaaataagtagtgacaaagatatggataatatggaaactcttaagttaccaagtatttcaaagtatgaggatcttacaattattaacattccaagtgtctatagcaatgatgataacttctcaattaaatatgcatcaaagttgacagatttaatcgaatatacttctggtaacattgttttaaatttatcaaataattatggcgggctgaaagaacctatgattattggtgcgagttctttaattcctaatggaatgctctttagcaatattaataataaaaaggaaaagtatcctgtttacttaaaaaaatggtaaattatttggtggcattccaggaacgattaacgaactgaatctttataaattatcattacacaaaaagaaactagggaaaaaagttgcagttgtaataaataataacacagcaagtgccgctgagagtttacttttagcgttaaagaataatccmaatgtaaaagtttttggtatgccttctgcaggatatacttcggttaatytaggacgtttttttactaatcaaaattccgataattattggtggtttgtatatactgttggctattatgagacaataaagcccataaagggaaaatgattgtttaacaatcaacctgtcccgccagattattatgtagatttatcgatgttagatagaaatactcaagatattacacaattttctaataccaagaaactattcaaagaaataaaaaattsgattaactctgattgagttgaaggtacattaaagtaaatgaattcttaatgtatagtataacttgtaagcataaaatttttataggagaaaggcttttgctaaaattatattgtggtaaaagtcacatgaaagtgggggggagaatcgatgacgaaagggaaaaaaattttgtttagttttatttctttagtttttggaacttttttatttgcagtatttgttcattatcagttcatgtattcattacctatttattttattaagtttgaagagtatccttttatagggaattacattcaactatatttgtactggggtagtgttataggtatggtctttatccttttatttattttagggattgttttaagtccagcagaagtaacatccgtgaaattaaacgatgacaaaggaatattagaaatcaaaaaaagtgctattgtaggaattgttcagtcgcaattagatcagtccaatttattaagggattcaaaagtaaatgtaaaaatgtataagaaaaagataaaagtacgtattacaggaaatacaagtgacaatctagatattataaatcaaacgaatcaattagtaaaaaatattgagttatatcttaaaacttttataggattagatacttcaataaaagc

SEQ ID NO: 620 - DNA, 1676 bp; double-stranded, linear
ataaatttctggtgttnaaaaagttcctttaatttctttataacctagtatagataantcatcactnatatacgnatattcaatattaggaatttttacattagtttctaaatttgtatttaaaaaattatatattgctttttcttttgcataaccttttttcttattagtactaaattttgttttaaaaatgtattcattattaactaaatatgccacactatcatamccactaccgattatttcmatactatctactttgaaattatcaaagtaatgctcaattaaatatttcattgccttaacatttgtggcattatcatcatatctatattccattaaataacaatcttcttttttgccctcgtgtaattcatgttctggcaaatcttcaataattctaaaaccagatttttggtatgcccttattgctcttggattatttttatgagggtctaaaataactgcattagcatttctttcttttttcaaaaattcaaaaatcaatttaatatatcttgtaccaattcctttactccaataatttggctctcctataaattgatccataccatagactatctcatcagtttttggataatgataatcagtatataactcatcatacattttatatatttgtccatatccaataggaacattgttatattcaataattactctaaaaacttcatcttcccaaggctctgtataatgtttttttaatgattctaatgtatattttttatctctaccaccataaaattctaatactctttcatcagttaaccattttaacatcaaaggaaaatcatcatctattaaagttcttatacatatttcattttcaactatattcatttatttatcacctttttcataatcatatacatatactatttcatctttataatcatttttaccacctaatttttcatatacatggcaagctctaggattacctttatcagttattaaaaacatttcagaacaaccaatctctttagaatattccttaataaaagataataattttgaaccataacctttgtcttgatagttaggtaacattcctattgagtgtaaataaaacattgtttttccatcaggncttaaaagtgtatagcaatatgcaaatcctataattttattatttkctttagctataaacccaaatgaactggtatcattaagaaatccttttaaattatcaatatcaaaaaccatattatcatcaattaaaacttcttccataaactcagtcaagtccagactcctgtgtaaaatgctatacaatgtttttaccatttctacttatcaaaattgatgtattttcttgaagaataaatccattcatcatgtaggtccataagaacggctccaattaagcgattggctgatgtttgattggggaagatgcgaataatcttttctcttctgcgtacttcttgattcagtcgttcaattagattggtactctttagtcgattgtgggaatttccttgtacggtatattgaaaggcgtcttcgaatccatcatccaatgatgcgcaacttttgaatattttggktgatcgatataatcatgaatcaatcgattttagcctcacgcgcnaagttaatactgtggacttaaaaatccctaanagcgtctctgaagaatttgaattgtttta

SEQ ID NO: 621 - DNA, 1635 bp; double-stranded, linear
atccccttagtataaatacaaactcaaaggagagacaaaacatgtcaattattactgatatttacgcacgcgaagtcttagactcacgcggtaacccaacaatcgaagtagaagtttacactgaaagcggagtttcggccgtggaatggttccttcaggagcttcaactsgtgaatacgaagcagttgaattacgtgatggcgacaaagctcgttacttaggtaaaggtgttactaaagctgtagataacgtaaacaacatcattgctgaagcaatcatcggttacgatgtacgcgatcaaatggctatcgataaagcaatgatcgatttagatggaactcctaacaaaggtaaattaggtgctaacgctattcttggtgtgtctatcgccgtagctcgtgctgctgctgattacctagaagtgcctttatatcactacttaggcggattcaatacaaaagtattaccaactccaatgatgaacatcatcaacggtggatcacatgctgacaacagtattgacttccaagaattcatgattatgcctgtaggtgcgcctacattcaaagagctttacgtatggggtgcagaagtattccacgcattagctycaatcttaaaaggtcgcggtttagcwacttcagtaggtgacgaaggtggtttcgctcctaacttaggttcaaacgaagaaggtttcgaagtaatcatcgaagctatcgaaaaagctggctatgttcctggtaaagacgttgttcttgctatggatgctgcttcttcagaattctacgacaaagaaaaaggcgtttacgttttagctgactcaggcgaaggcgaaaaaacaactgaagaaatgatcgcgttctacgaagaattagtttctaaatacccaatcatttcaatcgaagacggcttagacgaaaacgactgggacggattcaaaaaattaactgaagtattaggcgacaaagttcaattagttggtgacgatttattcgtaacaaatacaactaaattagctgaaggtatcgaaaaaggtatcgctaactcaatcctaatcaaagttaaccaaatcggtactttaactgaaacatttgaagcaatcgaaatggctaaagaagctggctacactgcagttgtatctcaccgttctggtgaaacagaagattcaacaatctctgatatcgctgttgcaacaaacgctggccaaatcaaaactggttcattaagccgtactgaccgtattgctaaatacaaccaattattacgtattgaagatcaattaggcgatgtagctgaatacaaaggcttaaaatctttctacaacttaaaaaacaaaatanttcattaaatggaatamcgcytaaagggrcmattggttaatgamccaattctccttatactcggacgtaaaaaccgcctttctgcaaagaaaggcgtgntnttttatatttataaaaatattgaaaaaatagattagaaataacttcaaccgtacatcgctctataatcacttgtttaaaaataacaaaacattaacaaaacaacattatataaaaatttaataaaacaaaataattgttattttataattttagtattgactggtttcagataacgctgtacgcttaaagaaat

SEQ ID NO: 622 - DNA, 8001 bp; double-stranded, linear
agagggtgctttggtccgtgttcaagcctttgcaactattaatggagaagatattaccactagtttagcggcggacgcttgaaatctctaaaatcagttggtagtaaaaatcaattgtccattttacaaattcaagaagaagtatccaaatattatcatgtgcctcttaaagatttaaaagggaaaaaacgggtgaaaacaattgtggttcctcgtcaaatctcaatgtatcttgctagagaaatgaccgacaattccttgccaaaaattggtgccgaatttggcggcaaagatcatacaacggtgattcatgcgcacgaaaagattcagcaattattggaaaaagatccagcgattcaaaaagaagtcagtgaaattaaaaatttattgaactcttaggatgtggaaaactaaacaaaaaagaacaaagttatccacaacttatgcacaagtggataacttagtaaaatcaatgctcttttgacttttccacagaatcaacatgccctattacttttattatttatttatatataatatacaaaacagtggcgtacaaaattggamcgtattgaaaatacttaaaaaggagtttacattatgaaattaacggtcnaacgaagtgtctttttacaagaattacaaactgttcaacgagcaatttcttctaaaacaacgattcccaatcttaacaggtgttaaaattgtgttatcagaagatggcttatcacttactgggagtaacgcggatatttcaattgaaagttttttaagtaaagatgatgaaaaagctcaaatgaccattgaacgcacaggtagcatcgttttacaatctcgtttctttggcgaaattattcgtaaattaccagaagatatgttcacaatggaagttctagataacaatcaagttgcaattacttcaggaaaagctgattttacggttaatggattagatgctgataattatccgcacttaccagtaattgatactcaaaaccaaatgaaattacctgttcatttattgacaaaaattattagtgaaacaggttttgctgtatcgatgcacgaaagtcgtccaattttaactggggttcactttattttagaaaatcaaaaattacttgccgttgcgacagattcacatcgtttaagtcaacgtgtgatcccgacagaacaagcagtagaagactttaacattgtaattccaggaaaaagtttaactgaactttctcgttcattaaccaatgaagaagaaatggttgaaatcagcattatggaaaatcaagtgctatttaaaacagaaacaatgtacttctattctcgtttgttagaaggaaattatcctgataccaaccgtttaattccaactagccataacacgcaaattgaattttatgtaccagaattgctttcagcaatcgaacgtgcctctttactttctcatgaaggacgtaacaatattgttcgcctttcaatttcaccagattctgttgttttatatggaaattcacctgaaattggaaaagtcgaagaagctttaaactatgaaaatgtttctggtgaagcgttggatatttctttcaacccagattatatgaaagatgcgttgcgagcgtttggcgatatgaatattaccgtgaaattcctttctccaattcgtccgtttacattggagccaaccgaaacagaactagatttcattcaactaattacaccggttcgtacaaattaatcatgtttaaaaaagaccttcggaaaatcaatatgatcgccgaagttcttttttgtcgtctgtttaaagccgataaacgctgctagataagctttttataactagaatagcttttacgctaatatgattgtgaatgtttgaactatcgtttgacgaataaattctgcctttttttcgtggataaagaaaaaagccctttaatttttcgtttaagggctgttcatttttttatgaatatttcctagtgaaagaagtttacgttgcttaaaacgacgctcagacctctacaagctacttttcttcattgcgcgccctcttcgtttgtctttgagttacccctaattgttttttagttaaacgctactcgtcatttctgccaaatcaggccccttttttctcaagaaaatatcaatttccgttttaaaatgctttttaagagtttttttatcctaataatattttcggtcatttagaattaaaattgcttagaatgaaaattagacagataaatttgttttctcttatgaaaaagggtataatatatatgagaacgtattagaaaaaagagggatgcacattgaaaaaaacgtttgttttagcaactgagtatataacgcttggtcagtttcttaaagaaatcaacgtcattggtagtggcggccaagccaaatggtatttggcagataatagcgtgtttgttgatggcgagttggaaaatcgtcgcggacggaaactttatgcgggcatgatgattgagatacctgaagaaggtactttttttatggtgaaaaacggaaacgagtccgacgatgcggctgaatgagctgacacttcagcattatcgtaattatgaaacagtcagcttagattttccaaaaacgttaaatctttttttaggcgaaaacgcccaaggaaaaaccaacttgttagaaagcatttatgttctagcaatgacacgaagtcatcgaaccagcaatgaaaaagaattaattggctgggaacaagcagcagctaaaattagcggtgtggttgaaaaaaagacaggcaccgtgccgttggaaattttaatttccaacaaaggacgtaaaaccaaggttaatcacattgagcaaaaaaggctcagtgcgtacattgggcaactgaatgttattttatttgccccagaagatttatctttggtgaaaggctcacctcaagtccgccggaaatttattgacatggaactcggacaagtgagtcctatttatctttatgatcttgtccaatatcagtctgttttaaagcaacggaaccaatacctaaaacaactagctgaaaagaaacaaacagatactgtttatctggatattttgacagagcagctagctgaatttggcgggaaagttctatacgctcggttaggttttcttaaaaaattagaacactgggcaaacttactccatcaaaaaattagtcatggacgcgaaacgctcaccattgactacgcatcaagcatcccaattgacaacacggatctttccttagaagcacttcaaaatcaattgctccaacaattaatgaacaatcgtaagcgtgaattgtttaaagcgaatacttttttaggccctcatcgtgacgatttgctgtttattgtcaatggtcaaaatgttcaaacgtatggctcacaaggccaacagcgaacgacagctttaagtattaaattggcagagattgatttgatgcattcagaaacaggagaatatcctgtgttattactagatgatgtcatgagtgaattagataatgaacgtcaaattcacttgttagaaacgattgaaggcaaagttcaaacgttcttaacgacaactagtttagatcacataaaagacaagctaacagttgaaccagatattttctatgttcaacaaggcaagatagaaaggaattcagcgacatgacagaagaagaaaaaaacatgagagaacgtgcgcaagaatatgacgctagtcagattcaagttttggagggcttagaagctgtccggaaacgtcctggtatgtacataggttctactagtggcgaagggttacaccacttagtatgggaaatcgttgacaactctatcgacgaagccttagcaggatttgctaaatcaattcaagtaattatcgaaccagacgatagtattactgttatcgatgatggtcgtggaattccagtcgggattcaagccaaaacaggtcgcccagctgtggaaacagtgtttacagtgctacatgccggcgggaaatttggcggtggcggctataaagtatcaggtggcttgcacggtgttggttcctctgttgttaatgctttatcgaccagtttagatgttcgtgtttataaagatggcaaagtgtattaccaagaatatcgtcgtggtgcggttgttgatgacctaaaagttatcgaagaaacggatcgtcacggaaccactgttcactttattccagatcctgaaatttttacagaaacaaccgtttatgattttgataaattagcaacacgggttcgtgaattagcctttttaaatcgaggcttacacatttcaattgaagaccgtcgtgaaggacaagaagataaaaaagagtatcactatgaaggcgggattaagagttatgttgagcatttaaatgccaataaagacgttattttcccagagccaatcttcattgaaggagagcaacaagatattacagtggaagtgtcaatgcagtatacagatggctaccactcaaatattttaagttttgccaacaatattcatacttatgaaggcggaacgcatgaatctggttttaaaacttctttaacacgtgtgattaatgactatgcacgtaaacaaaaattgatgaaagaaaacgatgaaaaattaactggggaagatgttcgtgaaggcttaaccgcagtggtttccatcaaacatcccgatcctcaatttgaaggacaaacgaaaacgaaattagggaactcagaagtacggaccgttacggatcgtctattctcagaatactttacaaaatttttaatggaaaacccaacagtcggcaaacaaattgtcgaaaaaggcatgttggcttcaaaagctcgtttagccgctaaaagagcccgtgaagtcacccgtcgtaaaggcgctttagaaattagcaacttgccagggaagctggctgattgctcaagtaaagatccggaaaaatgcgaattatttatcgtcgaaggagactcggccggcggttcagcaaaacaaggacgtagccgtgaattccaagccattttgccaattcgtgggaaaatcttgaatgttgagaaagccagcatggataaaattttagccaatgaagaaattcgatcattatttacagctatgggaacaggcttcggcgaagatttcgatgtttctaaagcacgctatcacaaactagtaattatgaccgatgccgatgtcgatggtgcgcatattcgaacgttgttattaaccttgttctatcgcttcatgcggccaattgttgaagctggttatgtgtatattgcccaaccaccactatatggtgtgaaacaagggaaaaacatcacctacgttcaaccgggcaaacatgctgaagaagaactagcaaaagtgttagaagaattacctgcttcaccaaaaccaagtgttcaacgttacaaagggttgggtgaaatggatgatcaccaactttgggaaacaacaatggacccagaaaaacgattaatggcgcgagtgagtgtcgatgatgccattgaagctgaccaaatttttgaaatgctaatgggcgatcgtgtggaaccacgtcgtgcgtttatcgaagaaaatgcccattacgtgaaaaacttggatatttaatgtgtcgcaacgttgtaagagacgctagaacatatatttagaggggaaaaaattcatgagtgaagaaattaaagaaaacattcaagacgtcaatctgaccagcgaaatgaaagaatctttcattgactacgcaatgagtgttatcgtagcccgcgcgttacctgacgttcgtgacggtttaaaacctgttcatcgccgaatcttatatggaatgaacgaattaggggtaacccctgataaaccacacaaaaaatcagcccggattgttggggatgttatgggtaaatatcacccccatggggacagtgcgatttacgaatcaatggtgcggatggcacaaccttttagttatcgggctatgttagttgacggccacggaaacttcggttccgtcgatggtgacggcgctgccgctatgcgttataccgaagcacgtatgagtaaaattgctttagaaatgctacgagatattaacaaaaatacagtcgatttccaaggaaactatgatgattcagaacaagaaccagtagttttacctgctcgttttccaaacttactagttaacggaacaacggggattgcggtggggatggcaacaaatattccaccacacaatttaagtgaagtgattgatgcaacaagtttattgatggacaatcctgatgtaacgacgaatgaattgatggaagtgttacctggaccagattttccaacaggcggtttagtgatggggaaatcagggattcgccgagcatatgaaacagggaaaggttcgattactgttcgtgcaaaagttgaattgactgaaatgccgaatggaaaagaacgtattttagtaactgaattgccttatatggtgaataaagccaaattaatcgaacgaatttctgaattacacagagataaacgaattgaaggaattactgatttgcgggatgaatcttctcgtgaaggcatgcggattgtcatcgatgttcgtcgagatgtgagtgcctctgttgtgttaaacaacttgtacaaaatgactgccttacaaacatcttttggttttaacatgttagccatcgaaaaaggcgtaccgaaaattttaagcttgaaacgtattttagaaaactacgtcgagcaccaaaaagaagtcattactcgccggacgatttttgacaaaaacaaagcagaagcacgggcgcatattttagaaggtctacgaattgccttagatcatatcgatgaaatcattgccattatccgtgggtcacaatcagatgacgaagcaaaagcaacgttaattgaacgctttgaattttcagatcgtcaagcgcaagcgattttagatatgcgtttacgccgtttaacaggcttagaacgcgacaaaattgaaaatgaatatcaagagctattgaaattcattgcggacttagaggacattttagcccgcccagaacgcgtcattgaaatcattaaaacagagttaaatgacgttcgcacaaaatttggtgatgcacgacgcacagaattattagtaggtgaagtcctaagtcttgaagatgaagatttaatcgaagaagaagaagtcgtgattacattaaccaataacggctacattaagcggatggcaaactccgaattccgggcgcaacgccgcggcggacgtggtgtccaaggcatgggcgttcatgatgatgatttcgtgaaaaacctagtttcttgttcaacacatgacacgttattattctttacgaacactgggaaagtttaccgagcaaaaggttacgaaatccctgaatacggtagaacagcaaaaggaattccagtgattaacttactgggaattgattctgcagaaaaaattcaagcgattatttctgttgagggcaaagcggaagcaggtaaatacttgttcttcacaaccttaaaaggaaccgtcaaacggacagccgtaacagccttttctaatatccgtagtaatggattaatcgccattagcttaaaagaagatgatgagttagttaacgtagtaacgactaatggcaatcagaagatgattatcggaacacatgcaggatactctgtcacatttgatgaaaatactgtacgtgatatgggccggacagcatcaggtgttcgtggaatccgtctccgcgaaaatgattatgtggtcggcgcagcgattctggatgaaaataaagaagtcctagtcattactgaaaatggttatggtaagcgtacaaaagcctctgaatatccagttaaaggacgtggcggtaaagggattaagacagcaaatatcactgagaaaaatggtccattagctggtttaaccacggtcaatggtgatgaagatatcttattgattacgaacaaaggcgtcattatccgctttaacgtt

SEQ ID NO: 623 - DNA, 2508 bp; double-stranded, linear
tttatgatttaacgattatcggcggcggtcctgttggattatttgccgctttttatgcgggaattcgtaaagcgaaaacgaaaatcattgatagcctgccgcaattaggtggtcagctaacaatgctgtatcccgaaaaatatatttatgatattcctggattccctgctattaaagccggtgagttaattgccaatttggaaaaacagatgcagccatttcagcacgatgtttgcttggaagaagaggtcacacaccttgcacaggaagcagatggacttttgcgcttagacacaactaaaggcacacattattctaaaacggttatctttgcgattggtaacggcgctttccaacctcgacgtttagctatcgaaatgttgaagcctttgaaggtgagtccaatccattattatgtgactgacatgaaaaaattcgctggcaaaaaagttgcgattgctggtggcggcgattccgcaattgactgggctttaatgctagraaacgtcgcagaagaagtatctattatccatcgtcgcccacaatttcgcggccacgaacatagcgtggaacaactggaaaaatctagtgtttctatcagaactccctatatcattagtgatattttaaaggaaaacgaaacgttcacaggcatccaattaacggagacaaaaggtgaccaaacattggatctccctctggatgatttaattatcaattatggcttcacttcttctttaacacacctcaaagaatggggattagacgtttctagaaatgctattaatgttcattccgatatgtcaactaacattcctggtgtatacgctgtaggggatatctgttcctatgagggaaaagtgaaattaatcgctacaggctttggtgaggcacctactgccgtaaataatgctttacattacttacggcccgatgctcgacgtcaaccagttcatagtacaagtttatttgaaaacggcgtacctaaataaggttagcactggactttagcagtttttaagccaaggacaaaaatctaaatcggatttttgtccttggctttctgctttactgaaaagcctttctttttctcttttaaatttatttttgatacaataaaaagtgactnggaggaagaaagatgaaccaaccagttatttatttaggtgaagtattcaacgaagaacaactggaacaagtgaaagctgtggcacccaattatctagttaaaacatctaccgatsatttatcatctgctgaagaagaggccatcgaaattatgttaggctggcataaagaaattggtccgcgtttattagcatctgatactagtcacctaaaatggattcmgctcatttctgctggtgctgattatatggattttgatmaattaagagaaaaaggcattctgttgtctaatggtagcggaatccatagtgtttctatctcagaacatgttttaggcgttttattagcacatacccgcggactgcaagaaagtatccaacaacaaatgcaacacacatggaatcaaacagccccttcctatcaacaactttctgggcaaaaaatgttaatcgtaggcaccgggcaaatcggacaacaattagctaaatttgctaaaggtttaaatcttcaagtttatggcgtgaatacctctggacatgtgacggaaggcttcattgaatgctattcacagaagaatatgagtaaaattatccatgaaatgtccattgttgtgaacattcttcctttgactgaaacaacaaaacatttatacaatcaggcactttttgaaaaaatggctcctgaaacaattttcgtaaatgttggtcgaggcgcctcagtagcaacgaacgatttgataactgccttaaacaataaaaccattgcttttgctgccttagatgtctttgaagaagaacctcttcccgaagatagccctttatgggagatgcagaatgttttattaacacctcatatttctggcatgacaccgaagttcaaatcaaaattactggcgatttttattccaaacttaaatcaatttgtgacggatcagaccctcgtcaaaaaccaagtttccttaaaaaaaggctattaactcaaaaaaggccttcaaccatctttcaagtaattgtatggttgaaggctttttttgctattttttaccagataaccttgaagttatcatttgtcgacgcttgaatgattggatgtttttttaaatattctgcaatcagttccgtcatatcaatttgaatttctcgaataattttttcaggttggaacatttgatagtttccgccaccgactgctcggtattgatttgtcacgatttccaaaacatcttctgcttgcactgctttgccatgataattaagtttcgtcactctttcaccaaacggttgtcttaaatcaagcgtatactcaatgccttccawaccwwaycataatnatagtawtgtggttttggatcgacatatttcgggttgaaaattggttggc

SEQ ID NO: 624 - DNA, 763 bp; double-stranded, linear
tttaggttgtcttttcatgcctaatttttatatagaatacttagtagaggaggaagttgattaaattatcagaaaaaaagtgtttggaaaagtcggattggttgcttaaaaatagaaagatatggggaaaaatatgattaaaaaaataatagtcgttgttgctttcatgcttacaggcttctcgctaactgcgatgagtgcatctgcagaagaaataactgatttatttttacaaaaagaagtgacatattctggtgtagaaggaggaaaaattggagagaattggaaataccctcaatttgttggcgaaaaagctgtcgatggcgatgaaacaacacgctggtccgctgataagcaagatgaacaatggttaattgttgatttgggtgaagtaaaaaacattggcgaactcgttttacagttgcatgcagaaagtcctgtgtatgaaatcttagtttcaacagatggtgaaagctatcaatctatctttaaagaagagaatgggaaaggtggccaacctactaaaaaatatattgatggcaataatgtmcaagcacgttttgtaaaatatcagcagatgaaaatgtgsgcaacacaccaaataagcaattttacagttcaagtattatttcgtttgargcatatganaaaaaacgactggccagaagcgattaaactttttaaccgagaacctggactattagtggaaaaaaggaaagccaccgctagcctttggaagtgtccnccagccgggagtaggtta

SEQ ID NO: 625 - DNA, 446 bp; double-stranded, linear
aacccactctgtggtaatgccaaaaatcccagaaatcgtttcattctggcctgcgatggatgcagtgatcaatgatacgtacaaaggcaatatcaaacctgcggattatcaagcaaaattagataaattagtccaagacacatcaaaagaagcaaaagaataaaaagagtaaagaaatgggacgagcttcaatctgctgtcccatttcctctatcttttttatttaagtagaaagtgagtgaacgaagatgttcaagaaaaagaaagcccagacgtcatttcgagaggtctttaaaaaaggcgacttcgctacaaaactatcttttttagttatgggtgctgcaaacttcgccaacaagcagtggttaaagggaatcmtctttttaacagctgraattggcttatcyattggggtaatccgtaatnggttccncgccattaaanga

SEQ ID NO: 626 - DNA, 1478 bp; double-stranded, linear
aattttggtttgttggtgttgaaaccaagcactttgttcaaaaggtgctgacaatgtttgtaagtgatgcacttcgatctgattggttgcctgcggttctgttgtgaaatcatgggcccgaatacctatagaatgacaagaaataggaacttcttgtgtaaccattagtgtttgttgccagccaatcacttggactctgtgcgcatctatgcgtttgacaggccaaatatttttacaaccagtgagtttagctgcttcaatcgtttgaggttggttaaataattganttgttgcaccaaaaagtgtttggttttttgtgattatcactaaactctgacataacttatacagttcatctaaactatgactcacaattaaggcatgttgatttaaattacttaatcgctgttgaagktcaatttgcagctcttcctttaagggtgcatctaatgcggaaaatggctcatctaataacaggtaagccggctgagccgctagcattcgcgcaaaagccactcgctgtctttgtcctccagaaagttgactaggatattgttgttggactttagttaagtgaaaagatgcaagcaattgagtgaccaattgtaaatcttttgtcacgcacgtcagattttctactaccgacaaatgaggaaacaacgcatactgttgaaacaaaagaccaatttttcgttgttgcggcgacaaattgatctttttttcagtatcgaataagacttgatcatttaaaacaatctgacctttatccgcagtctcaacacccgcaatacattttaacaacatactcttgccacaaccagaagcacctamaattcctgttgtttgagkctttgtttcaaactgaatttgcaaagtatgacttttcaattctttttgaatatcaacaattaatctcattccgatcttctccaagcgcgctgactaaaaaattccgtaaaaaataaaataatcaggcmaagtaataacatrattacaacatattgattggctaaacgccaatccccacttgctacagcagagtagatagctaaaggaagcgttcttgttttaccagcaatattccctgctaacattgtcgtcgctccaaattcgcctaacccacgggcaaaggctaacacgccaccggscaagagaccgttcatcgacaaaggtaacgcaatttttctaaaatatcgactttccgaaaatccgagtgtctgggccacagccaacaattcactatccatttgttcaaacgccgttaaggctgaacgtacttaaaggaaatgaaacagcaacggcagcaataaccgtagctggccacgaaaaaacmacttgaatggcmaaaaaatcmagtwaaaactggcccactggttgctgaacaccmaaaatagttaagrgaaaaaaaccaaaaacagtcggcggtaaaactaatggcaacgtaaataaactattcaaaagaatttttaatttacgat

SEQ ID NO: 627 - DNA, 1661 bp; double-stranded, linear
cctctttcgtagaacgtacaggaatttctttaaatattaccgatgttggttgggcacctttggccaccatcacttggggatctccttacaccctttactttcttttaattatggtgattgtcaatgtcattatgttaattctaaataaaacaaacacattagatgtggatattttcgacatttggcatctatcgattgttggtttatttgctattttttgtggcgcaaacttaataattgcaacaatcttagttattttcataggtgttttaaaaattatcaattctgacttaatgaaaccaacgtttaacgatttacttaacgccccagataccaatcctatgactaccacacatatgaactatatgatgaacccaatcattatggtttttgataaaatttttgataagctttttccttggttagacaaatacgattttgacgctgccaaattgaatagtaaaattggcttttggggatcaaaatttgccattgggatttacttagggatttttgtgggtcttttagctggccaaacacccacgcaaattttttctctatcctttacggctgcagtctgtttggaactattctctttaattggaacttggtttatcgctgcagttgagcctttatcccaagggatcactgattttgcttcgaataaattaaaaggacgtacacttaatattggtttagattggcctttcttagctggtcgtgctgaaatctgggcagcagctaacgtattggctccaattatgctattagaagccattgtcctacctggcaataaacttttaccacttggcggaattattgcaatgggtgtaacccctgctctactagtagtaacaagaggtaaactcatccgaatgattatcattggagcaatcgaattacctntgktcttatggtctggtaccctaattgcaccgttcgttaccgaaaccgcaaaaaaagttggcgctttcccagcgggtctaaataataatactttaatttcacatactaccatggaagggccaatggaaaaattcttaggatacttagtcggcaatgcatcacaaggtcaactcgaatttattttatacgcatgtctggcgctagtcgcctatctactgattttcatttggtatgcaaaacaaatgaagaagcgaaatattatttatgctcaaaaagctcaataaggggarctaaaaagaagaggtgcatctgcacctcttctttttagtagatcaccctgacaactttttccaatactttagatgtgtcaaatttatctttatttgtaactaccgctgtcacttcttctaattgataaaaagaataaaaatcctgtttctctactttagaagtatccattaacaaatatttttctattgagttatctaatgcaattgcttgtgtttgtccttcttcaatagtggctgtcataattttattatcttttaacgcattgcaactaaaaaatgctttatggaaatgcatttcttctaatgctttattagcgatttctccaaaaaaagatttagttaaaagtcgcatttctccaccaaccaaataaatggtcaacgcattcttttttttacttaacgtttcaaacacaggcaaacagtttgttactactcttaaatgtttaaattccattgcctcggcca

SEQ ID NO: 628 - DNA, 2359 bp; double-stranded, linear
tcagttccagttgggtttcgttatggcatcttgaacaaaagtaacacaccacaaactatccatttaaatgcgagaaattatcaaactcacacgaacgttgtcacggatggtttctatacacgtttgagggatgatcgcacaaaagataacggttggaaactaactgcgcagttatctgattttagcgatgagacaaattcaacggtgttaacgaattctgggatagctttaaaaatggaaaatatgaaaattgaatctataaaaaatcgagatactccacaagagagtattgatcaaaatccaacaggaacaccttcaactgttagcacsaatgaaacgctgatatcaggacaagcagcraaracattgatyaatgcacaggcaaatgarggycacggtacgtggcaactaaggattccttttgataaagtgtccttgactgtaccagcgaatacaggggaaataaataaaaattatacagcgactttgacatggtcgttagatgatacaccataggaggagagttctattgatacaagtatggattggatacctttgttttcttgcagcaagttcttttataggttttctctatttctttttgaaagatagtcgattgcgtgtggacaacggtaaaaagtcaacggaattactagtagattgtggtttgatgtttatttctttattatcaatagttgcatctgttctattatatctcaactggcaagaacagttacagtattttctaaactgataaaaagaagtaacttcaatgacgaaggaaagatgtgtcatttgaagatagtcaacttacaattatctaatggcaaaaaagctattgcatcatggtttcaaattaatcaattaaaagctctttaagaattattgatttaaaggaatatacatcttaaaggggcatatcaagttgattatcgtatagtgttacttcataagagaaactaatattgatcttaatacagaatagtctttgatattcaaatatttagtaactgtgttgtatttatagtaaatactcattaggagctgcaccagttgcttaattagttggcaatgaggaactattaagaattgtttaacgaatttaacttagttaaaaggggaaaatagttaatgaaaaagcgcgtagttatgactattgcggggattatgggaggaacctttacctcgagtgctgttgcattagcacaaacaaaaacaagtgtggaagaaaggggtccagtacaagagagtacgatttcaataccagacagtgagatattggcggaggaaaaggaggtagcagcaacaatagagtctactaccacgacgtccaccataaagacaaccagcgatagcctcgaaaaagcccttgaggcaactacctcagagacttcttcgacagaatcggggagcgcaagtcagtcaagcgcttcacaacataggaaagaaatagaaacagaggaaacttctctaaaagcacaaactacatcaacggttttaacagggatgataggaacgagtcaatggagtttagatcctacatctggagaattaactataggcccaggagtttttagtgatgatgtatcatctgcgttcgactccatatcaaatgttaaaaaggtaacattttctggaccggtgaaagcaggaaaaagtttaaaaagtttattcagtagctggtttgcgctattgtccattgaacgtctggattatctggacacgagtcaagtgacagatatgagttatatgtttactaattgtactggattacaaacgttagatgtatcaaattttgatacgagtcaagtgactaatatgagtatgatgttttataattgtcgtggattacaaacattagatgtatcaaattttgaaacgagtcaagtgacagatatgagttatatgtttgatgcttgtagcggattacaaacattagatgtatcaaattttgaaacgagtcaagtgacagatatgagtagtatgtttgatgcttgtagcggattacaaacgttagatgtgtcgaattttgatacgagtcaagtgactaatatgaggggtatgttttttctttgtactggattacaaacgttagatgtatcaaattttgacaccagtcaagtgacagatatgaataatatgtttgctgggtgtaaggctttacagacactagatttgtctaattttaatacaaatcaagtgacagatatggctgggatgttttcgtcttgtgataaaatccaaacagtaaatgtgtcaaattttgacaccagtcaagtgacaaatatgggggtatgttttctcattgttgggaattacaagcattagatgtactaagttgtacatccaaaggangttg

SEQ ID NO: 629 - DNA, 1130 bp; double-stranded, linear
ctccacaagactgacattggtactgatggaaaactgcttttttccgttctactaaaggcggtgcataacgggcaccgccagtcttagccaataactctttaaagtccttatctttatgctgatagcctttgccagctaaatgtaaatgatagtgacataactcatgcttaatgactttttccagttcctcttgtccatactttaaaaagacagttggattaaaatccaggtgatgcgaantaaatgatagcgaccgcccgtagtttttaaccgccgattaaatgtagcttgatgcagaaaaggkttctgaaaaaatacgattgaaattttttccactagcgtttgaagcgcttgatctgtcatcaagactggttgagactctttcattgttactcttttctatcagcccgaggcaacatggttaaactaatacgcccctttttcaagtcaacatcttctacccaaactgtgactacatcccccaccgcaacaacatccgttgggtgcttaacaaatttagtacttaacttagaaatgtggactaagccatcttgcttcacaccaatatcgacaaacgcaccaaagtcaattacgtttcgaacagtcccttgcatttccattcctggtttcaaatcttccatcgtcaacacgtctttacgtaaaagtggtgctgacatctcatcgcgcatatcacgacctggttggattaaactagcaataatatccgtgagtgtttctgaacctacttctaactcagtagctaattgattcactggkaactgtttcaatttttcgatagcttctgctgtccctaattctttagaagcaatctctgctttttctaaaattgcttgtgctactggataactttctgggtgaatgccagtgttatctaacacatttttgccattaggaattcgtaaaaagccaattgctgttcaaatgctttggncctaaacgagtactttttgactgattcgtgctgtaagacaccatttcacacgataaggacaagttgcgcgtggtttattaagcagaatagtggtaaagtgagaccgcggatcacatacaccactgggtacgagttcacacaaatccatgccgcagcgttgcgaacgcagcgaatgacg

SEQ ID NO: 630 - DNA, 2132 bp; double-stranded, linear
cactacaaatgaanangaaagaaaaacangccaattaaagaaaaacaagaagaatctacaamaaatatctacgcaaaatccaagcggattatctaccaaggamacaaaaatatgaaacctataaccgattttttcaagagcgaaatagttttactaaatcagatacagatgccacatttatgcgaatgaaagatgattatatgcgcaatagtcaactaaagccaggctacaatttacaaatcgcaacagaaaatcaatatgtcctagcgtatgatctgttcccaaatccaacagatataaaaaacttacagacatttttagacagctttttggaacaacacaacgaattacccgagtatattgtagcggataccggctatggaagtgaagaaaattatacgtatatcaacgatgtcttacataaaacgccattaatcacttatgctagttatcgtaaagaaaataaaaagacctatagaaacagtccttttatggttgataactggcgctatttggaagaagatacatatatttttcctacccatcgggcagttcctttcaagagatatagtcgaggaaaagagaaaggcggatttgtacgtgacttcaaaatttatgaatgtgaaaattgtcgagattgtcctgttcgtagtcaatgtacgaaagcaaaaagtgagcaaaaccgacaaattttagtgaatatacatgacgctatttcaagcagaatgtaaaaagaagcttttagaggaaaagacaggttcgatttatcggaaacgaaaaatcaatatcgaaccagtgtttggccatctaaaggctcatttggtgttccaacatttccacttacgagggaaacaaggagccgagattgacattggattggcactcatggaattaaatttaaggaaattagggaaataatttctgagtattgtaccggattagatgcccatcaaaataatgttgtgttttgaaaggtccatttattcaaataaatagaatgttggagtataactatattgcttatgtaatataatttatttttattgtatatttgttcccttttcgtacttttcaacttttactaccrgrgtwtmctaaaatatgctatatttttactacagtagttataaatttgagataaaaaaggagtttttttttggataaaggagtcgctgatattgtaaaaattaagcaagtgttgaaacaagaatcagtaaaaagcttagtagaaggaactgggttaagcaagagtactatttcaagtttaaaatcaggtactcgaaaagtagaaaaactaaacctttctgcagctattaaactgacagaatattcagatcaagtttttagacctattattgaaatctggggagaaaaaccgaaaaaataaccacagttattttatgaaactaataggattaaaaatagaagaactagaagttttttagatgaatgcttgtttagctctataatggatagaactgaaagataatattcttcagtcctaccattatagagctataattttattcaatttcaagaagtcttttttttaccaataatttaagatatttcataagatcttcttcaaattctatagattccctatcttgttggtacaaagataaataaagaaatattttttttcgatagaatacgttaaaatatgaatagatatagatagtaattatattatctataaatagtagagtataacgatcttttatttttggattttctataaattttaagtagtaagaaaatctttttcgttcaaacttttctataatctctaaatttttaatttgaacagaattagttgaaataagcatataaaaatttaatagtaattgctccttatcagattttagacgtactctttcaattatattcatgatatattcatcgatggtagagcttttatcagcaattttttctaattcagagtttattatatccaaattatacacaatcactgcctcatataaatcatgttttgttttaaaaaagctatatacggtagtagtgctggttttagcttcattagcaatatctaaaagttttgtttttycataaccaaatttagaaaagtggttccattgcgggtaaatataatttctnccnttttnaatatc

SEQ ID NO: 631 - DNA, 1610 bp; double-stranded, linear
ntnaggtggaaggcccaacggattactggttagccctgtacatggttaatactaatagatatgcttgattgtaaatttgtagtgaagtacaatttattttaagagtatatttgtaatattctgtataagaaattatttaaggaaggaacaaatttaatgaagaagaaaaaaatgatgaagaacttaaattttgtaatcttacctttgttattaggggtttgtatttcattaatatggaatataccattttttgckgtttckggrgctatttactttgtacttttagtttttttggttccgtcagttgactttgcctttacagatttcaatactatacgaataaatccgcattacagaggaagaagaaagataattttatctaatgatacattgacattagtattagttttaatagcactaatagtatctgtggtactatcatatttttattatagataagaagtataatggtaagamgggatgaaaaaaatcaaatataaaaccataaggatagataaatatttatarggtcaaaaacttttaagtttttgacctctttattttttcgtgctatacttggaattatcaagtgtcaaaaaattatgttcagaaaaggtgaggaaattttggccatttatggttattcaagagtgagtactagtaatcaagattacaaaacccagattcaaaaactagaaaaagccggagcagaaaaaatattcagtgaaaaatatacgggaataaaaaaagaaggaagaaaagaattagaagaactactatctattgtaaaacctggcgataaagttttagtgacgaaaattgatcggctagctagaagtatcgttgatttaaattcgattatctcttctttaaataattcaggagtgactatcmccttcttagwtaatgccctaacctttgaccaaataaaagtgattctatgcaaacgttaatgatgaatatgctgggtagctttgcgcaattcgaaagagatttaatcgtgacgagaacgcaagaagggaaacagtggcatcgagcgaacaataaaaattatcgagaaggtcgtccgaaaagagttctaaatgataaatacaaacatgcactagagttaatggaaacaaacmgcmtgcgagaagtgggaaaggcaaacaggtatttctttatctactctcaaacgaatcaagaaacagccaaggaagaacmgttacttagtgrgraataattccaggagtacttataatggaaaatagagagaaaattattcarttgttcaagaatcctttagtaacaggttatgggattgagataatgtcaaacgggcgactttattcagcaaacttccaaagatataagaatcgagyaaagaaagaagagaacccrttgattatttttgagagcatgacagaaaaagttgagcaggtatttttagaattagctgaagaagtcatacgaacgaaccctaaaacaaaacaagaattcaakgaaatgattaragaatatagttataaggagratarcaaatgrtagytcgaaaaamatatgatcattttggtattgaaattggtatgtggaaccgagacaatgtagtaaataaaatagagtgtgattgt

SEQ ID NO: 632 - DNA, 626 bp; double-stranded, linear
tcaacaaattattgattatttacaaaatgaaattgattcagggcgattgcctgttggagcgcaagtgcctaccgaaaaagaattatcggctcagtttaacgtcagtagaattacgtccaaacgagcgctaactgagttggaaacgcaaggcgtaatccaacgtcaccaaggaaaaggaagttttgttcaagcaccaaagcatcctcttcatacctctttaaataaagttctttttttattgccttttgcagacgatttatcagtaggaaatttctatagcggtttggcccctactattcaagcagctggtttagaagtctttatgacctcgcctaattttttgagagagaaaaatgctgcggacattgtgaatgagtttgccgggcttgtctattatgctgctactagtaatgactatctcgacttactgttcgagttggcttkgatgaattttccagtcgttgycttggataaaaagatccatgatttaccttttgcaaccattcaatcagacaactttgctggtggtaaaacagcaaccgaacgcttaattggcttaggacatacaaaaattggatatatcctttcaggaagtccagccctacaatccgttcggcaacggtatt

SEQ ID NO: 633 - DNA, 5678 bp; double-stranded, linear
actcagcacgtcaaaacatgcacaaatttagtggccaatggtctgtgtttgccaattctaattttgttttagcagmcggaaccaaagtgaataaaggggmcgacatttcgaaactattcacgatgacctttgaacaaggggtagttaaaatcacggccagtcaagcgtttttggatgcgatgaatctaaaagaaaacaaacacgttgcgcactcatggaaagcgttcattggtgtagaacgaattgcggcaggagacgtttacaacacaatcgaagaatctttcaacaatgagaagattaaaactaatacggtagtgacacatacgccagaaaaaccacaaacaccaccagaaaaaacagtgattgtaccaccaacaccaaaaacaccacaagcaccagtagagccattagtggtagaaaaagcaagtgtggcacccgaactacctcatacaggtgaaaaagaaaacaccctattatctgtactaggtgccggaatgctagttggtctggcttggtttggtttgaaaaaacgtgaagtgaaataatgagtaaaaagaaaaagcactgtgaaaaatcagtgctttttgtttattttagaaaaagtgtggtgttgtcaagtgtggataataatttttgcgttaagttgtatcgtagtatctataataattggagcatttgtcagtgcaacggtcgatgaacgattgggagacaatatttttttgctacttctagttattttatttttttggtttattttgatttttaattgttaagtatatttttttatatgctattttaatatatttaataagactaggtgaaagtattattaattcagagatagctgctattgtagctccgaaataaatattggtcatactttttgaaataaacgacattattatagaaggtagcattataaatattgttggcaaaaaggcaaaataataagtttctttggtgatagattcgttaaattctttgattttttgaaagaaagatagttgtttatgatagaatatcttaattttctgtatctcgtttaaagaataaattaagcgcacaaattctttatttaggtaataagttagaagaacggtatctttgttaatcattgaaactaagaaaacttttgtattacatgggatatcatttaaagaaagttcttgggacagtacgtaaaagttactatgcttacttcttgaattagaaggtattaaggttctataaatatcagggagctttgctattgagaaaataaatacaataaaataaatgataaagtaagttaagtaagctttaccctctttagtaaggttatttatatctgaaacaaaatcggtgaatgctgtgtctgtagttattaatgcataagcaaaaataccagatgaaagtagtaaagaggatattagattaataaaacctttaaagattttatataatccgatttcagtgggagaggaaaaaaggttttttttaaatgaatcacttattacgtatccatagatggaggaataaattgtgaaaaagcctataactataggtaaaagtatacccactggttttattaattggttaaaaaaatcaatgttcatataaataattactccttataaactttttataataattatatcaaaaggacgtgaatatatgttaataaaattaggtacagaattgacgaaagaagaatatgttacaaggtatatgcgaaactttcagaaattattgttgctcggcgatcggccaaaagtattaacgaatcgtgaagaacaactcttgcagtatgaaaaagaattatgtgtgctgttttatgaacaatttataaagaaacatcatagagcgcctgatgaagccacgctagacgatcaagttaaagcgaatttcatagagcgctctaaaattttcgctcgatctcccttagtaatggacgaaggaaattttacgcaagcacatattggtcaactaaaacggttgcgtgaattgcgcatggaagactatttgccagacaattatacgcatattttacaacgagaagaagaattggcacgtaactattttcgaaaacatgatgattatccatttgggtatgagtgtttatgtattagtcggtcacgagaagtggtgaaccaagggctagaaaagctcttagaggggttttatgacagttatcaggtttattatcgtcggtatcgtaaaaatggttagaaatggaagtaggaataaaaagcgcaggaggtgtagcgagcaatggcagaagaatccaaatatccgccagtgaaagaaaaatctgtgttttatcagcgttatagtcgtgtttcgacgatttctatgttgatggatttaggttttagtgtgagtgaagcccagattgataatgaagatattgtttatatggaacagtataaagagtttttattaaataaaggaattgtggaagaaaaagttccttttaaacgagaatttgtagcggagtatccattaagcaaaatgcgacgactttttgtagaaggctattatttacgaaaaccgagtggtgaaaaaatgtatggtagctactattacgatttttattttaaagagtattcaggaatggggatttattgtacgaaagcaacaaaatctctttttttacatgtttttgaacaaagaattagaaaaataaaaaaattaaaacatagattggaagaatgaaaatgaaaaaaatgattattattgccttattcagtacaagccttttagcagggggaagcagtgtttctgcttatgcgcaagaatcagaaggaaatcttggtgaaacaacagggagtgttttaccagatgaaccgaatgtaccaactgacccaataacgccaagtgagccagagcaaccaacagagccaagtacaccagagcaaccatcggaaccgtcaacaccaaccgaacctagtgagccttcaaaaccgacggatccttcgttaccagacgaaccgagcgtaccaacagagccaacaacgccaagtaagccagagcaaccaacagagccaacaacgccaagtgtaccagagcaaccaacagagccaagtgtaccagaaaaaccagtagaaccaaataaaccaaccgagccagaaaagcctgtgccagttgttcctgaaaaaccagttgtaccacaacaaccagagcaaccaacagatgtggtggtaaagccaaatggagaaattgcaacaggagaatctacacaacagccaactgttccaattgaaacgaataacctttcagaagtaacacatgtcccaactgtgacgacaccgattgaaacagcaagcggagaagcaattgtcgcagtggataagggcgttcctttaacacaaacggctgatggattaaaaccgattaaaagtgaatataaagtattaccaagtggcaatgtacaagtgaaaagtgctgacggaaaaatgaaagtacttccttacactggtgaaaaaatgggcataattgggtcaatcgctggtgtatgtttgactgttttatcaggaatcttaatttataaaaaacgtaaagtgtagtgagtgatgtatgaaatttttaaaaaaaattcaaacaaaggaaaaaagcaaaaagagcccaagagttcgtttactatcacaaaaaaaagcgaatcgattagtattaattgtggggtgtgctctttttggattgtcattgattggtgctattcgagcaaatgtgatggcaggcaacgtgatccgcctcagtcaacaattagaaacaataaataaagatgtcaaaaaaataaaagaaaaaaagagagtgtatgattcgtcggcactctctttttatgtcagaaattttgtgaatgagtatatcaattttaatggaaaagcaacagatgaagagaaaaaagcacgtgatgagaaattagcgagttatttttcaggagatttagcgttagataaaggaacagacaatgctgcaaaagacttaattcgtaaattattacaagtctctgttactcgtgtagaagaatctgaagagctattacttgtgcatgcgagtatatcttataaagtgcaacaaaaagggcaggatttactagatacacaagaaattgttttacctattcaagaaaaaaatgggttgttttctattgttggtcgtccctattttttagcaatgaatgttccgaaaggaaaacaggaaccattgcaatcagtgaaagaaccgcttgatgttgaaaaaaaagaacgacaagggattgaaaaatttttacaattattttttgaaaaatatgcgaaggggaatacagaagaattgtctgttttaatgaaagaaccagttaaaacaagtggtcaagcaactgtgtcgtctattgaagaaaaagaactacgtttttttgaaacgaaacaaaaaggtgttacaggcgttcaggtgtcagtgaactttaaagacaaagcaataaatttcctttacacggaagatttttcgttgtggttaacgaaaacagaaaattcgtattttgtacaagagttaaaacattattatacagaaaaggcaggagataaatagtggatacaagtaaattaagtcaatttatgagtagtggattgattacacttattgcgtttggtgtgatcattttaattttaaagcattggaaagaagctgcgtggttaaagattggttcagttattgtcattgcattgattttaaatgactttgcgacaaataatgggcagaacattttcaaagttgtgaagtgggtcttaggattatttgggattcagctgtagaggagagaaataatgaaacattttgattattcgaggggcttaaaagccccttactcattacaagttattaagtccccaaaagggaaaattgtttggtattttgcacaacccttaagtttagcttatttagtgatgttatttttagggattgtactaacaggcattttttggaagtttgtaccattgccgttaatttttggtattaatcttaacctaatgattatgttgtattttccaaataaagtggctcgatggtatacagaaacagagtttgaagggaaaacaggattagcttttttaaaagatggttttgtttatgtaaaaaattatgtgttagacaatagatcaattatatcctttgaacgagtaaaggaaatagaagaattttcatttaaacgttagtaataagaaagagtgtattatggtgaaaacatgaaaaaaagaagtgtgttgtaataacttcttttttcatgtttaaattatgaatttctatattttaaataaagcataactgcacagactattattccaataactaaaagtagcacagtaacaatactttcatttttatctatttttctttcaggtctatagctaggattaatttgtttggcgttaaaatcagtaattccaaagtctaaagtaggaagtaaaaagagtaataaaataatatatataattcccgctataaggaaaataggggcgctagtgaaaagtgaaataatggtacctatgattataggaattaaaatgtataaaaaggatttgataacagattcttttctcattttaattaccaaattttgttattcatgtttcccatatttcctaaaggaacacaataaccaccgctcatatttttcccacctgtagaccagccaccttttttaaaataaaaacctccaggac

SEQ ID NO: 634 - DNA, 1068 bp; double-stranded, linear
cctttttattggtaacaaggtacgtatgatcgaagggtaattnccactttatacggnccaattttttcataacttgccgttgaatttccacacccagttcaaattcagataatttggattctgtaggcaaanccaagtcgaacaaaatcttcggctcttcgcccatgggtaactaagcggatatcatggacttttaaagacgcgtcaaaagaacgaataatctttttgattgtttgatgaacaaattgttgtgttgggtcatacaaattcactggnatcaatatgacaaacaagattaacatccaactcttctttaaacttcgcttcaatcgcatcgattgtctgatgggctttatttaaatcccagcgatcatcaatttcaatgtgaacagacgcaaacgtttggctgggaccataattatgaatcagtaaatcgtgataccctacaattgtttccatttttgataagacattcttcatttcatcaatttctgtttggctcggacgcatgcccatcaactcattaataaattcgcgaattaactgcaagccactataaataatatatgcagcaattaaaaaaccaatatatccatcaattcgcaaaccagtgacgccttcaataaatgcagaaatcaaaacagctaatgtagtataaacatcattaaagctatccttagcagaagcaactaatgcttgagaatcaatttttgctgatacttttttgtaaaacagcccttgccaaattttaatcccaattgataaagctaaaacagcaaataaaatgggtgtcascttgattgattctggatgcaggatgcgatccacggaggtcgttagaaactcaaacccaataaacgtaatcactaatgatacaagcattccactaatatattcaaaacgttcatggccatagggatgttctttatccgctggcttaccagcaatataaaaaccgactaatgttaaaactgaagaaatagtatcggacaagctattaatggcatctgccatgattgaaacactacctgnaagcaagccaatcataaatttactaacggatagaat

SEQ ID NO: 635 - DNA, 995 bp; double-stranded, linear
tcggaacggcaattacatacatctctttttcatgaattgttacatcactcatgactttcattccacttacagaaatgatgccacaaacaaccacaaaaacaccgccgataactggtgccggaatggccgaaatcaaggtggaaagttttccagataagccaaataagacaaaccacgcacctgcagccacaaaaaccttgcgactagcaactccagtgattgaaataatcccagcatttgtagagtaactagttactggcgtgccgccaatgaatgaagaaactaagcaacctaagccttcaccaattacgccgcgattaattttttcttcggtcaaaggttcagcgacaacatgactcacagcaaaccaagtgcctgttgtttccgccattaaaaccagatwaataactaacatcgtggcaatagctgaccaatcaaattggaaagaaaagttaactaatggtaactgaggcaaactaaaccaagccgctttactaacggctgataaatcaagtacccctaataattgtgccgcgatgctcccaaataataatgccaaaatgacagaagaaacgcggaaaatccgcccttttttcaaagcagaacctaagagcgcaaagaagatcaacgtacccgctgctataaatgctaataaaatattttgtcctaattccccttttgcgtggtaaatattatccgataaagcgactggcattaacgaaagccccaccacaaaaataattgttcctcccacaattggtggaacaaatttagtgattaaacgattaaaaataccagtaaatcctaatataataacaacaattgcccccactaaactagcacctaaaatgcgccccagccatttccttgttggttattggcaaaataaattcctgcaattgccccgattggaataaatgaagggccttgcgcaactggtaatcnccataccaaaaatggggantggaattaatcgtgggcaagtncctgctggc

SEQ ID NO: 636 - DNA, 1038 bp; double-stranded, linear
cgnctatccaagatggctggaaaaatccngcacgttccaaaattccatggaaggaattaaaanaaaccgggaaagngggcataagtcgttccgacttatgcccccccccttcgtaatcttaagattatcagstaaatcaaagtgagttctttttaaagaaatacttttattttagccttttatagatctaaataattttctaagtaatctgctaaaccatcttgatcatttgttttttcagtgacatcgttggctacggatttaattttatccgtggcattgttcatagcaacaccccaaccagcataacttaacatttcttcgtcattatgttcatcgccaaaagcaatgatatcagctggtttgacagataaaaagttcgccacttgatcaacgccatgggccttttgaattccttttgcgaccatttctaaaataggcattggaccgccccaagtgcggacatcaatataatcaccatattgttttgtcaatgtatcagcaactttttcagcttggtttggtgtggtccgaaccatcattgaggtaggatttgttcgtaaatttttagcagtaagtaaattatctaaggttgctttggaagcaaaaaatttcggatcgaacccatctaacgtatcgatataaaatgtttctttgttttcagcagcaacaaaatctaattgtaattcttttttctgtgccaaaatgtcaaagactaggtcacgctcaatattggcttcgctttccaagtcccattttttctctggaatgtggactaaagcaccgttaaagttaaccataggggtcgttaggccaagttgttggtaaaattgatgactcattctatagggacgtccagtggcaatactgacgtaatgaccgttgtcaatcgctttttttagtgtttgttcggkttttggactgattaaagactgtgattaatgtgtgccgtctaaatcaatagcaattaatttttgcaagtaaaaatcctcctaaaatgcctttnactcantctagcataagaccgaagattatccn

SEQ ID NO: 637 - DNA, 551 bp; double-stranded, linear
aaatataccataggccagttttatggtttttttaagtacccatcccaagttatttgggagtaattgtatttatcctttaatgcaattgggatcctacagtaacttctaattcccttggtcctgtctttgaattgaagaaaacaagcaattcctatagaaactgctgtaaaccctataattaacaatataacagtctttttattcattcctacttcactcctttatcaaagattcttccagtaattcatatgaagatactccttctaatcgtttatacacttttccttctttgataataattacagtaggagtctgtgttatatttaattgatctaaaagtaaattactttctttattcttctcttctagtctacgccatatactaataaatttttgtctttaattaccttattcaagtcttttttttgtacattacatggttggcaaccttttttaaaaaaatagatattcaagtctttattttgagaaaccttgtncctcaatactctcagaaatcggtnattttatattncaatctcttctttatttaa

SEQ ID NO: 638 - DNA, 1636 bp; double-stranded, linear
nctcttaatggttttacnttttcgtaagttttcatacctatatctgnccttatctaatgtttattttagtttaacatatatttaaaatagatttttaaaaaagtttatttcagatgttgacatgtttgttttggaatgatatactctgtgtataaagtctgaaacagataatagacattctgttttggataaacgaaattaaataaacgaaaaagcgttcacgagaagaaaatgaatctccatttcgtaaacgccgcataataaaacctagacacttttattgtacggcatttgacgagataatacaagagtgaagttttcattcaaggttatcagtctttttgtggtgtggtatagtcagccaatgaatgacttgcaaggtggcagtagtatctttaattagagccatattgatgaagattttaggtggaaggtttctagctttcatacgaggactaggttcgcatactgtgtatttgtaaaagattaacagttagaacaatggagtaatttccgcttggtgattgaagggtgttcatttaaaagaatcagattatttccgataaccatgtcgtgatgacacgttagaaataattgccgaattagattgaataaaaaaatctatgcaagctcaataaaaggaggagagctgtacaccgtatgaggtaaatctattaatgtgccgtaatgtaatttttattactagccgttgaacgatatycyatgatttactttgaatgtaagaatcctaaattttaatgcaattaaggttgttatttacacgagtggaaaagattttttctaaaagaataaccaccttaactggaaacgttaaaaataggagctaattacttaattcctatttatataratattttagaagtgaataatcttcacttttaaaactttttctaaaactttgtcggttgcatatagaaatgcaattgcacaaagtcctaagaaaagcaatctatttacgattggtccgtaaataagagttgtcgctaaaacagcagcgataacaaagattacttcaaaaagatatttgaagttacgcatagataccacctccttttatttagttattttattttaacataataagggaggttggtacttatgatgtagcgattgtaagtgaagcataactagaattctctggttgtgtttttttgtgtttaaaaaagaaaaaatcgataaataaattaccaagaggagggaagtcatgatagaagaattattacttttcgttgagaagtttgttgaacgtatgaaacgtcagaaaaaagcattctctatttcagatatagaaaagagctataacttagaacgtaagaagttaggtaagagtgcagttaagttaacaaatatggaccgtctaacaattgaaagtcaattgttaaaatatcagattttacagcggacatataaaatgacaggttatcataaaccttgtcaagttgtgttttttagttagtaataagaattgcataaagagagaaaggcagttagttgttgactgtttatttttgtataaaaattaagtgaaagaaggaaattatttggcmaatagaattcaggaaattgcattaccagaaaaaatctaggagtaaattaaagctatttgtanancaga

SEQ ID NO: 639 - DNA, 474 bp; double-stranded, linear
tggtatgattatgacaactccagaccttggtggagccactgaatattggaatatttttggataccatgttgcacaaacaaactatgcctaccaagtaattccggtattagcttccgtatatcttttgtcaatattggaaaaatattttcataaaaaacttccttcatctattgattttacattcacaccattattatccgtaataattactggattcttaactttcacagttattggtcccacaatgttattactatctaatggaatcacagatgctattgtttggttatataatgcaactgggktcataggaatggggatctttggtggaacatattcactcattgttatgactggtcttcatcagtcatttcctgcaatcgaaacacagttactttcarcatggacmaatggtatcggacatgggggtttwaycttgtagttgcttccatgggcaaatgtagcncaaggtgg

SEQ ID NO: 640 - DNA, 1094 bp; double-stranded, linear
tgtgtgacttctttgctttatgaacgtatccgtccagagtttcatcttgcacgctggatatattacgaaaaagcacgatatgagttaaaaggggtagaacttgaaagtgcaaaaatatttttcaacgggctaaagaacctatccgaatcagataaaaagattttaattgatgtttattatcgctcaaaagactattataaatttaaccgacaaacaggattatatcagtctgtcagaccaatttccgacgatgcaatagcagaacaatacggaattactaaaaaagaagtaacgaaagtaagacggcaagcgatagatcatttagcggaagaaatgcggaaaattatattagctataagtacagcctttcatttgaagataggtaaagacttatatctagttaggcttataaacgaaggaacatacaaagaacagtttgttcttggaaataaaagagaagctaaagtgtttagcgcagaaaaggaagacacaattagaaagtttatgcagctaggttttgaaagagagccagcatgaataaggcttaaccttgagaggtattcttatgacaaaaaataagttatttcatttaacagataagtccaatatcaatagcattagaaaacacggtttagtaggagtaaaaaaagcaaaggatcttttaagaagagagacaggaacagaccatacgctctttaatcagcaaacctattctattctaaatacttacgggtggaaaggctacgatcttagatgtgctacttttatgtttgaagaagatagttgtcttggctatgaattgctgcagctaatgaatgacgatccatatattttagaaatagagatagaccgtttaaataaagataaattatttgtgtttaatacggaaattgctagccatttgctaaattattcgaaacaagatcaacacaggctagctaagttttattggaatacagcaattccatacaacacttatgtaccaaaaccaaggacaaagttaaatggacgcttttcaatttaggcaattatccaggtaatcnaagcaggaataaggtnnaatttcggtgganatttccacccaaaattattat

SEQ ID NO: 641 - DNA, 692 bp; double-stranded, linear
acaacaaaaaaagcatagaacaatcccgttaaacatgttgcgtaaccattgtacaccacattgtattacgaaattcttccatgcctagtattatctagtcacatgaaaacgctattcatttgttaacagtgcttattctaacgagtatcattatttttgtcaacctttttcaattatttttttattaattgttgactattaacaaaaaagaagctcttatcggaaaaaaagtaccttcagctaaaggtacttttgttcactaatttattctttataggcatacttatatgtgctcgttgcaccgaagttatgatactgaatacctttgacacctggtcgtacaagctgactacgggcctcttggtataaaggaattaaagcggcatcttcttccaccaatactttttcagctttaattaatgtttgccaacgagtttcaggctcatttgcgtatttagttgttgcttcttcaattagttgatcaaacgttgggctagaatagttcatacggttaccactaactgagctttctaagaaagtcattggatcctgataatcgggtccccacatgccaacagacaattcataatccccttttctcattaattcaattgcattatttaaaggactgttttgacattaatagtgagaccaggcacgttcttgtactggcctggataatncancacttt

SEQ ID NO: 642 - DNA, 1485 bp; double-stranded, linear
agtacaaccatatggcagatggctgaaggtattattaatcattgttaatcttggcgctttgtttagtattctgcgtctatttattcatttgttgatttgaaggggtcgaaaggtgagaaaatgagaaagttaattttagtttttgtgggttgtgccatggccttttgtttatggcctaatcaagcggcggctgtagctggtggctatggcggcgggcgtgtagaaagtcctagcggaggtaatccctcgaatggtttttcgccaagcggtgatggatcaagaagttatgttcatcataacgagaccgggaccagcaacacaacgccactggaaggcttaatttcaacagtgttttttgttctttttgggggcacgatgatttggcaaagacgccgtagaaatcaaccagtcgatgaaggagcttttcaagaaatgtgggcakcattacctggaacatcaaaagaaaaaaaggcactcttaaaagaaatacaacaaacgtttttagaaatacaacaagcgtgggatcaagaaaacttgtctgtggtcaaagataactatacagaaaaactttatcaaaaacatcttgcagtattacaagcaaatcaacaagtgggcatcagaaatcatgtgaaaaaagtgaaagtagcgccagcttcgaattatcatcatattagtgaaacgagtttttcactgatgcttcatttktcttgtattgactacgaggaagatactcaaagcggtcgtgttttatcgggatacaagcatcaaaaacaatatttttcacaactttggtattttgattacaatccatctcttggaaaatggcaagcagacttcattcaacctaaaggatagtgctaaaaagcgcttggggtttaaatcccaagcgcttttttattcttcgatgcgttttacaagctgtatttttttatttaatacgtaaatcaggataccgccgacggtcattgaaagaagttcaccaagtccaacggtcaaccatgtgtaccaaaaaggtaactgataaaagaacgttaagggtccggcgacagtgaacatggacaaagcaaaaagaatggccgtcagcattagtttaatcaataaattttgctgattttttgtcgcaaaataggcaatccataagactgcgcacgttccagcactaccgatgactatatcgatgataccaagaggcgaagcggtgttggcaatcgcaacccctaacgtaatggaccagatatatcgcttgttaaaaacgcctaaataattaaataattcggcaagacgaagctgtatcggaccaaaactaagcggagcgagaagtacagtgacaacgacatacaaagcggtaaccagcgccattttagccaacgccgtagctgaccacgtactggtttgtggatttgatgaatgattcatttaagattctcctttataaaacaacgacgtgttttagtgataaccataaccaaaggaagggcagtaaag

SEQ ID NO: 643 - DNA, 951 bp; double-stranded, linear
agaaatatcatttcaagttctttttaaaaatatttttaaatgaaattacatttcttatataatttttgtgctatactaaaagaaaacggtttaggagtgattatgtgcgggttttgctgatttatttcataactatttttctatccaatacagttggggcgctctctgggatgggtggaggcgtcattattaagcctgttttggattttcttgggttccattcgttaaatagtattgcgttctattcaagtgtcgctgtttttgtcatgtccatttcttcgacttataaacagtatcaaaatggtgtccaaattgaatggaaaaaagccgcgagtatttcgtttggttccttagtcggcggcatgttaggtgatttacttcttaatcaggcgattgcactagcgccaaatgaagaaaaagtacaactaatccaatatatcatcatgttgctgaccttggttttggttcttctctacaatcaattttccaactggcacttacacctcaacggattgagcatttttctgattgtcggattaggcttagggattctatcaacctttttaggcatcggtggcggtcccattaatgtagcttgccttattctcttttttggaatggatatcaaatcagcaactgtctattccatcattactatttttttctcccaactcgccaaacttggcaatatcggcttgaccacagggtttgcggtttttgatttgacaatgctttgggctattattcctgccgctttattcggtggttatgtcggaggtcttttcagtaaaaaattatcccaacaacgggtcgcccaaatttatagtttagttgtttttttagttattttgttaaatatgtataatttgtggactgtnatcnaaaaaagaagcgctttgwcgtatagacaaaacgcttcttttttaattaaatcactgtnaattgaacatc

SEQ ID NO: 644 - DNA, 647 bp; double-stranded, linear
tccagagagttgccctccagctgaggctatcccatttgatggagtttttttcagactatgtaagggtgaaaacttttgcsaagaagattttcttactcattttgaagctgggaaaagtttcccagataaaaaactgtgtgaagctatggcattatcattttttgatagctatgatcatgcagaaaaattaaaaaaaagatttagaaaaaaattngcaacatgttctatcaaacctgttgcaattattgaagattatggagtaggaatttttgaagagaattcagggcatcttaatttatgggagcacaggaacgttgatatttttgctgatttaatgaaggaggataaaggaaaagatgaataatctaatattttcagacatgggaatatattttcgkttttgactattatgatactcctttatttttcatttctcgaagtcggaaaaataataattacyaattawtctactctataaatgatgacgtttatttttacagtgagctatctgcttcggatattaattacttatttagtaatccaaatggatacgacattcttcattaccttaaaaagaagtctaaattaaattttgttatggtaaataataattcttttgatatctatagcttagcggaatatacaaa

SEQ ID NO: 645 - DNA, 1258 bp; double-stranded, linear
gacgaatggcccaacagggcacttacagaaacaatatctgaagtactctctaagcaacgtgtcgcaaaagtgtgtcgtaattgatggaagtgtactttgtccaattggactttatcgcgtaatttgtggaagtaatacgtaagtaagcgaggctcacaaggcttattattacgagaaaaaacaaattttccttggctgtgttctttttgacacttcaatgcattttttactgtattactcataggaattattcgctcagaatttatcgtttttgtacaatcgtagtaaagttgagtagattctccgaacgagcttacagatactctttgaaaagtatgctttacatgaatagtatccttcttaaagttgatgtcctcccatctgagcgcagtaattctcctatacgtaagccggtatgtaaagcgmcaataactgataatccytgttgctgaggatttttataggcaacattctccaatttctttkgcycttcaatatctagtgcacgaatatgtcgacgctttggtttaggaagcgaaatagttgaacagggattgcttttcaaatgctttgcttttactgcatgattcaaggctcttgaaaggataccgaatatgacacaaatcgtacttttactcaatccttgtgcgatcaagtcctctactaatttattcaatctcaaatcatctatttcatttaatgcagagtctcccattgtttttaagacatagttgcttaacttgtaactataactagcgaaagtagaaagttttacttccttctttacgatgactaaccactgttctatccattcattaagtgtaaaagcgccttgacctcgagattgatagatagtttgttgatttgcttttgccacatagagtttttgtcgtacctcttgataagtagaaccatagatatatccatactttaattttccatctatcttccttcctcgtgggaagcgaccttcccatcgtccatcttttcttttatatatattttcgccacgtttactcatttcaattcctccgtttaactactatgttctgacggctatattgacggcttatagaaaggcttatttatagctttaaagaacattagttataatataaatcgttattattgctaaaaaatatcattattttactttttgttgacacatattttggaagtagattataattctnctgtacggggatgaatgatgncctacattggtctatatatgantccccacaggggtttcaataac

SEQ ID NO: 646 - DNA, 555 bp; double-stranded, linear
actgtaacacttgacggccaagaccgcgacctcgttgcgtttttgtcacaacaaagccataaatcccccattcgtycttcaaaatgatccaaacgtagcgtggctaaaagttgattgttttctttataaataagtgttcgttgaaggtcctccggcaaaggcgtaccttcgagtaacctagccaaggaatccaaatcagccacttgtggtcggagaagtgtcagcttcgccaacgcctgtgagtaagtttctctttgaaaaaccagatactgttctgaaaaagctggcacaattccttgtctattaaaataattcaggccaacagattgcttgtcgtccatcacgagaaagacttctttcattccccacaaagctgcttgcttttcgagttcttgaacaagttcttcaaaaaatggtcctacatttggcgcaacaatcgtcgcttccaaggtttccccatcaaaacaataccctacgatatatgcttgaatggttgttccttcctgtataaaccataataagtataagctgattcctcangaaatgttgtccaat

SEQ ID NO: 647 - DNA, 1030 bp; double-stranded, linear
aaggcaagcgtcgattttcgacaatatccaataatgcatggctttgtccgtccatcatgataaaactcattgcactggtcacatgtcgaaccgatttgaattcatcaaagcataagacctttggcaaagtctgtttgaaaggattcaatgggcggtaaaatctcttcatgacacgatagaccgaagaagtggagatatttttctgacgggcgatttccgtcatggaagtattctcttttaagcgagcaataacagaccaacgaactttttgactaatgaaacagtatttttcagcgacagaggtatccgctacgaatgttctttggcaagacttacatttaaatcgttgtttcttcaactccagataagtgcgatactcatatattctttttcaatcagccaatcttcatcaaaaaataaatgtttatctgttaatccgagtaattttctagtatgattatccatagagcgactcctttgatagggtgatgttttggtcgactaaattttaccaaaagtgagtctctttttgagttgaaacgaagaaaaagggtgttggaaaatcgccttcgattttccaacaacacaaaatattatagaaccctttattctaaaggatttcaaggtgtctgtttgcatttattaaaaaaaagaaaaagtattggcaaccagaaggcgtcaccaacactagatattatagagcccataatatgctgtataatatctagtgtataggcttaagtggaggtatatatgaaaatattnactgttgaagatgataatatgataagagagggaataagtgaatatctttcagaatttggatatactgttattcaagctaaagatggaagagaagccttgtcaaaatttaatagcgatataaatttggttatcttagacattcagataccttttataaatggtttagaagtgttgaaagaaattagaaagaaaagcaatttaccaattctaatcttgactgcatttagtgatgaagaatataaaattgatgcatttactaatttag

SEQ ID NO: 648 - DNA, 1023 bp; double-stranded, linear
aaatatttcttctntcttttacataataagtagctccttagtttgacaattggttgtacccaagggtaggctttctttttgcaagcggagcaacatggtaccatgttgcgatattttgaatgacccctaccaaaaatactggtaggagtcgttcaaatttttggggttcccccaatccccatcgctacactttgacatttattgacgtttcgacttaccatttttgacctttattttttctttcttattgataaggagctaataactcatccagaaagactaaatacgcgtcatttcctttcaactttcgtaaataagtagctgcttcttcgtaaggaaataaatcaatttctaattctttttctttaaaatcatgaatcaacgtatccagttcttttagcaccgttccttttgatttttctttctttttctggtggactcttggttgttcactaagcgggtctgccaagaaaaattgtgtcagaataaatttactttcgtccgttaattggtccattttgttttctccttttctcttattatttgtttttaaaatcgagtgggatttgctatttgagcagaaatttttggttcattttggtgccttttttgctcgttagcttgggactttcccacttcagtttcttttttctncgcattcaataaacgttcttcaaatttattttgggggaagttgaatgccctttttctatggataaagcatggtcggctttttcaattagcgtgcgcgccctctttcgtgatcgtttctaacgattgcgtaaattcttctaactkttctccttgcttcgtccaagaagaaagataaccaaaagaatacgaggacgtatccagccctaagtgacgggagacaatataggcaactgattccgcttcaaattcttgtcgagaataaacgtcatctccaaatatcgcttgcgaatctgggtgaagcatggcatgcgtcatttcatgaagtaagacttttaaagtcatcacttctcctaaatgttgttggaggac

SEQ ID NO: 649 - DNA, 829 bp; double-stranded, linear
tattttcgattcattctttggcggcggcggtggccgttctgttgatccaaatgcaccaagacaaggcgccgatttacaatatacaattcaattgaaatttgaagaagctattttcggtgtcgaaaaagagrttaagtacaatcgagaagrtacttgtgcmacctgtggcggtaatggcgccaaaccaggcacacacccagaaacttgtcataaatgtcatggtctggaacaatccatgttgacgtcaaacgccattaggtcgtatgatgagtcgtcaaacttgtgatgtgtgtcatggcacagggaaagaaatcaaagaaccatgtccaacttgtcatggcacaggtcatgagaaaaaagcacatactgtcaaagtaaatgtgcctgctggagtagaagacggtcaacaaatgcgcttagctaaccaaggagaagcgggtaccaatggtggaccttatggtgatttatatgtagtctttcgtgttgaagatagtgatattttcgatcgagatggcgcagaaatctactatgatttaccagtaagtttcgtccaagcggctctaggggacgaataactgtcccaactgttcatggtgacgtgaaattaaaaattccggctggaacacaaactggcacaaacttccgcttaagaggcaaaggtgcgccacgtttacgtggtgggggcaatggtgatcaacacgtgaaagtgaaattaataacaccaaaaaatcttaatgaagaacaaaaggatgccstacgagcnttttgccaaaaagctgggccgggaccnaaaaatggttaacctnggaaccccaacccaagggaagga

SEQ ID NO: 650 - DNA, 1374 bp; double-stranded, linear
tgacactgtcggtaatttcttagaatcaatgcccagcttggttanctgatggtatggctatcggtggtggtatggtcgttgccgtagttatgcattagtaatcaacatgatggcaacaaaagaagtatggccattcttcattatcggtttcgtagtcgcagcgatttctcaattaacattaatcgcattaggtgctttaggtgtcgctttagctcttatktacttgaacttatctaaaatgggcggttcttctaactcaaatggcggaggcaactctggcgacccattaggcgatattttaaacgactactaattctgaaggaggagcaaagaaaatggcagaaaaaattcaattaactaaaaaagatcgtttagctgtagcttggcgttcaacatttatccaaggttcttggaactatgaacgtatgcaaaacggcggctgggcattctcaatgattccagcaatcaaaaaattatataaaacgaaagaagaacgttcagcggcgttaaaacgtcacttagagttctttaatacacacccatacattgcctcaccaattcttggtgtaacattagctttggaagaagaacgtgccaatggcgcaccagttgatgacgtagcgattcaaggggttaaagttgggatgatgggtcctttagccggtgtcggtgacccagttttctggtttactgttcgtccaatgttaggcgctttaggtgcttccttagcaatgggtggtaacatcttaggcccaatcttattcttcgttgcttggaacttaattcgttggtcattcatgtggtatacacaagagtttggttacaaagcaggttctaaaattactgatgactttcaggtggtttactacaagatattacaaaaggtgcttctattttagggatgttcgtactggccgcattagttcaacgttgggtatcgattaagttcttaccaattgtctcacaagttaagttagacaaaggtgcttatatcgagtgggataaacttcctgctggcggtgaaggaatgcataaagcctttgaacaagtgaaccaaggcttggcgctttcaccaacgaaagttactactttacaagataacttagatcaattgattccaggtctagcaccattactacttacattcttatgtatgtggttattgaagaaaaaagttagcccaatcgttatcattcttggtttattcgtagtcggcgttgtcggccacttaatcggcttattataagaatgacgaggtaagtttattacttctaatcaaaaaaagcggaagagaagtcgagaaacttttcttccgcttttttaaacaaagatgtaattttgtttgtttcgatcaggaaagaaacgtataataaa

SEQ ID NO: 651 - DNA, 8911 bp; double-stranded, linear
ggaaaaattcctggcggcttcattaaacgtgaaggtcgtccaagtgaacgtgcgacattamccgctcgtttaatcgaccgtcctattcgtccaatgttctcagaaggcttccgtamcgaagtccaaatcacgamcatcgttatgagtgtggagcaagactgtacaccagaaatggctgcaatgtttgggtcttccttagcgttagcaatttcagatattccgtttgatggaccaattgctggtgttgacgttggtcgtattaatggcgaatatgttttaaatccaacggtagaacaagcggaacaaacagatattgaattaactgttgctggaacaaaagaagccatcaatatggttgaaagtggtgccaaagaagtatcagaagaagatatgttaggtgccttacttttcggttttgatgccattaaagaactagtggcgttccaagaagaaatcgttgccgctgtaggtaaaccaaagatggacgtggacttattacaagtggacgctgatcttaaaaaagaaatttttgatgcgtactacaatacaatgaaaacagccgtaatgacggaagaaaaattagcacgtgaagttgaaattgacaaagtaaaagatacagtcaaagaagtttacgctgaaaaattttcggaacacgaagaagaagcacaattactaaaagaagtgaaacaaattgcggaagatcttgaaaaagatgtcgtacgtgagttaatcacgatcgataagattcgcccggatggccgtaaattagacgaaattcgtcatttatcatcagaagtaagtattttaccacgtgtgcatggttctggcttatttactcggggtcaaacacaagctttatccgtttgtacattagcgcctttaggggaacatcaaattatcgatgggttgggtgtccaagatagcaaacgtttcatccatcattataacttcccgcaattctctgttggttcaacaggacgcgcgggctcaccaggtcgtcgtgaaatcggtcacggtgcgttaggtgaacgtgccttagcacaaattattccatcagaagaagacttcccttacacaatccgcttagtagcagaagtgttagaatcaaatggttcttcttcacaagcaagtatttgcgcgggaacattagcattaatggatgcgggtgtgccaattaaagcgccagttgcaggtattgcaatgggtcttgttagtgatggcgaaaactatacaatcttaacagatattcaaggtttagaagaccaccttggcgatatggactttaaagtagcaggaacgaaagacggaatcactgctttacaaatggacatcaaaatccaaggaattacagaacaaattttaacggaagcattagaccaagcgaagaaagcacggatggaaattctagaagaattaacaacaacgattgctgctcctcgtgaagaattaagtcaatatgcaccgaaaattgaaatgattcaaattaaaccagcgaaaattaaagatgtcattggtaaaggtggcgaaacaatcaacagcattattgatgaaaccggcgttaagattgatatcgatcaagacggtaacgtaagtattgcttcatcagatgctgaaatgattaaaaaagccatcaagattattgaagaattaaccaaagaagttgaagtcggtcaagtttacttagcaaaagttgtccgcattgaaaaatttggtgcgtttgttaacctaattaaaggcaaagatggcttgatccatatttctcaattagcaaacgaacgtgtgaacaacgttgaagatgtcgtgaaattaggcgacgaagtccttgtcaaagtaactgaaattgacaaacaaggccgtgtcaacgtgtcaagaaaagcgttattaaacgaagaaaacaaagaaaaataatttctttttaaaccaacgaaaaccaaggaagcttcctttcttttcgttggttttttcgttgaaaacaagccctaaaaaagaaatgataaaaaaagctaaagacgatcgccaactcttttgtttatagtcaattagtggtaaaattaatactatcagtctgaagaatatctggggtgtctttgtgaaaaaatttaatccaaataaaaatataatcattaccttaattttagtcattattttagtaaccattattagtttaactgctgcgcaacgttctgaaaaaggcaaaaccaatgtcgttcaaggtggcgtcaataatagcgttagtatggtggatcgtgtgatttcttttccagctcgtgtggtggaaaacggcttgtcttcaatgggcaatttaattaacacgtttaaagaaaacgaacgtctaaaagaaaaaattgatagctataatgaattagctgtccaaaacaataactataaacgtgaaattgatagtttaaaacaagaattgaatctgaacgaaacgttagccaactatgaaaaagtaactgcgaatgtcattacgcgttcgccggatacttggcaagacttattaattatcgataaaggaaccaatgacggcattgaagcgggcatggcggtcatggcgcaaaaagggttagtggggcgtgttattgaagtcaatgcaacgactgcaaaagtggaactactaacgtctaaaaatgttaactcgaaccatttccctgtgcgagtaacttccgcaaatggcgaatcgtttggtttacttaaaaattacgacaataagacgaatgcattaattgtgtcacaattaactggcgatgccactctgaaagaaggcgatgtcgttcagacttctggcttaggtggtaattccccagccgatttagcggtagggacagttattaaagtgaaaccagatagttttggtttagatcgtgaagtgtatgtgaaaccttatgcggatgtctatggtatctccgttgtgacggtcgtgaaaagatcggcaggggaaagcgaatgattcggaaagagtatttaaaatacgtcacacctattctcttgtttttcttaatgttaattgatgctcatttaacaaagtcttttgaaacgtggacaagcaatgtttacttcgccagttctcatctgttattacttgcgtttatgtttgccgttcctaatttttctaaacgttatttattaattacttcgttaattttaggctttatttgcgatagctactacattggtattatcgggatttatacagttgcactgacgatttcggttatgttgatgtatacatttaaagaagtaattcaaacaaatttactaactggtttttttgggatcgtcatttttaccacgttgtatgaactgattgcggtactgattcaagtggcctttcatttagcagatgtcagcccgattttatttattacgcgtgtgttgggccctacattgctattgaacatggtgtggtatgttattttatcttatccactgaaaaaactgttttccgtaaaataaaaattgaaaattttgttcgtttgcgaaaaatgctcatttgttagcatttttcgctttttttattttctttaaataacaaaacaatgagaagcttaccctggagacttgaagaaagttgtgaaaaaagtgaagcttttttttgtcatttacaagaagaaaattgaaatattactgtaacatccatattatctcagtgacatacagctatgctacaattgctctatcgttgaaaaagagaaatttattcaaattttaataaataataaaaaagcttaacaaaaaaggattttcggaggacaacagattgaagaaaagtgtattatcggctctaatggtatgttccattacattaacaagcgtascgttgccatccgcagcatttgcagatgaatacgatacaaagattcaacaacaagatcaaaaaattaatgcgttaactagccaaatgtcagatgcagaagcaaaagttgccgcgattgaaaatgatatggttgaaacggccaaacaaatcgatacattaacagctaaaaagaacaagctatcatcagaagtatctaaattatatagtgaaatttctgatttgaatgtccgtattcaaaaacgtgaagtacaaatgacaaaacaagcacgcgatgtccaagtgaatggtcaaagtgattcaattattgatgctgtcttagatgcagattcagtagcagatgcaattggtcgcgttcaagcggtctcaacaatgatgagcgccaataatgaattactagaacaacaaaaagaagacaaagcgactgttgaaaagaaaacaaagaatgttgaaaaacaaattgctgaattagaagcagcaacaaaagaattaaatgataaaacagaatcattaaaaacattgaagattcaacaagaagtggctaaaaatgatttagaagcacaacgttctgaagaacaagggaaaaaagacggcttcattaaacagaaaaaagaagcggaaaaacgtttagcagaagaacaagcacgtcaacgtgcagctgctaaaaaagcagaagaacaagcggcagcgcaagcacaagccgcagcacaaaaagcggcagcagagcaagcgaaagcaacaaaagcagccaatgaggcagcagcatccgccgctgaagaaaaagccgcaacaccagtagtagaatcatcaacaactactgaaagtaccacaacgcaagaaacaacaacttcaagtactgaaacagaaagtgttgtaacaacacctgtggcagcagcacctgaaaaagaaaaagaagttcctgtaactaacccaacgactcctgaaaaaggcaatgaagcaaaaccagggaatggtggcgtgacttcaggaaaacaagccgcaattaatgcagctttagcagatgttggtaattcttatgcaacaggttggaatcaaccaggcgaatgtttagtatctgttcgtcgctggttagcggcaggcggtattaacttcggttatggtggtccaaacagtggctatgttgcttctggcgcaacacaagttagctggagtaacgtgcaaccaggcgatgttgttcaatatgaaagtgcctatagtccagatagctggattggtggcgtgcatactgtcttggttacaggtgtaagtggtggaagtgttcaaatcgttgaagcgaacaacccaggaggttctggttatgtttcttctaactctaactggtcaccagcaccaccagcaggattccgcgctgttgtatggcgttttccaggctaaatagtcatctattaataattgataacaaggagtggtaactaacaaaaatcgttagttgccgctttttttattcatttaattttaaatatatgcataaaatgtatctgaaaatattgtaatctggccgtttttttgcaattatagaggtatatacatattaggagcggaggaatcagcatgagcggaacgcacgatacaaaacaagcaatcgcttcagctttaatagaattatgtgaacaaaaggattttcgtaaaataagtgtccaagatattaccaaaaaagtgggcttgaatcgtcaaacattttattatcactttacagataaatatgatttattacgttggatttatcgtcacgatgcattgatttacttagaaacagatatttgtttggaaaactgggaggaacaagccctgaagttattaaaagcgattaaagagaagagtcatttttactatacaacggtgacctcagattcagaagttcttcttaatgttttttccgcttcgaccaatcgcttatttatttcattatttgaacaagtcgatgttgagaaccatttaacagataaagacaaacaattttatgcgaatttcttttcctatggatgtagcggcgtcttaacgaaatggattcttgaggaatatcctcaaactcctttggaaatggcgacgcaattattccgtttagcgaaagatacagaatttatggcttatcatttgtatgaacaagaagccaatgagtaatgtgtgaaggataaaaagttttatgaaggagtgaaacgttgtggtaactgtgttatttgtttgtttaggcaatatttgtcgctcgccaatggcagaagcgatttttcgtcagaaagtccaacaagccggtttagaatcgactattcaagtgttttcagcagctactagccactgggaagttggcagtcagccacataagggaaccagaaaaattttggagcaacaaggaatttcctatcaaggaatgcgggcgacacaaatccagccaagtgattttaaaaaatatgactatatcattgggatggatacgaataatgtggccgatttaaaagcattagctcctcaagaagagcaaccgcggattcatttatttatggaagttgtggctggtaaagaaaccatggacgtacctgatccttattatactggagattttgaggaaacttaccgcttagtggaagcaggtacctcagaatggttgaaaaaaataaaagcacagctgaaagattaggactatagtccgatagtactttctgtttccccttggtacaatagtgttaacaaattgttcagggaaaaagagacgggagggaagtaagatgaacagtagttatttatcctatgtttttgaattgagtttgtattatttattgttgataatgagtctgccgctagtgtatgctgtcacgtatcatttatcttttagtagtatgtatacaagtgaatggttaataatctctgttttcttatctccgttagttttattatttgcaggtattcgttatggttttgctcgtttgaaacagcaagaacgccaagtgatgaaataaagcaaaaaatccttgaaaagtgtcaaaacttttcaaggatttttttattaagccacccaatcggctaaagttttttgctccaattggaaagccttcaacatatcgtcgttggcgtctttaataggcgtcgttgctgctaatgttccttgaacagcaattcgcgtcgttgcttgtaaatcgccacaggtaattaaggtaatcatattttgaccaggaacgtcatcaattaactcaacacgggttggttcgattttttctacagaagttattttgtatgtataaacagtagataaatcagtgatataaatgagttcgtcttttttggttctttctaaaggtgaaaataaggaaacgccatcttccgttcgatgactagccaaggcataattgtttttccccatgacttgatcttctttcatggtcccggcaccagttaataaagcgacattggacaatcctttaaaaatgggcaaattaatttcgacacttggtatcgcaatggcaccaatcacaggtaagtttttgttttcaaattgggctttcatcaccgcttctgtgctcaaggactcaactgaatcaaagtcaaacgttgtttcacgagccatatttttcttcacatcagctggtttcaacttgctaacggcgtacgagcggctattttgttgaaccacccaactacgtatctgattgttaaaaattaaggctaagccaatgataaatagtaaaactaataaactgttgattaaccaattttttcctctttttttctcttttgggcgcatattttccctccttttaatgtatcaagtttaccacaatttatttgaaaaacctatttattttctttggggaataggtaagctggccggaccttaatttaataaaaaacaactgaatcgattgatttttcaaaaaaatcctcattttgtaatggaattttaaagtaaaagaaacaagcttttcttttgaaaatattgtaaaatggtaaggaggctagtagaggggagatgggaatttgcttgatttaatttatgtacatatagatgtaaccagcaacgcggttttatctaaaggaattacccattccgattttgttcgttcaattgtgcatcatccacagaacttactattattagatccttctgccgaagctggcgaatacgatatgcattcaggcttgaaaattattcgtggagaagaaagcgtcaatcgctattttcaatcgctacaacgtcgttggatgactgaagagattaaatggattgacttttccgatgtgacgatgctaaaagagctaacgccattagaaatttcggaacttctttattttggacacatgaagaatagtttgcattcgcctttcttttataagctacaaaatgattttgtcttttttgaatttgcagatcagatgacgcgtgtctattatcgttatattgatgaattttatcgaatctttgctgataaaattacacgtgttgttttagagaaagtcaaccagaaaaaggccttctttaaacgaaatacgcctgtcgaaaaattaagtcctgaattacttaaaaatatgaaaggtatcttgcaagaaggtgttattttttgcttccaacaaacggaagtggataaagaagaatatcggattcctatttacttggtggaagattcacttagcaagatgaaaaatacctcttaccaaaaagaagaaattttggcaacgcttgtctataatagtgaaaaacgcatttggcacattgaacaagagaatgatttcggtgaaatttttatgttggcccatgaaggctgagagagctctaactttatcaactaaagtagggctctttttgtagctatgatttgaatgagaaatcaagtataataaaatgataaaaaggaaagaaggttgtttaatgaaaaaaatactctatggcgctctgactggttttgccctctttttggtagctggctgtacacccaaaacgcctactgctgtttcatcaacaaatgaacaaaaagaaacagcaatatcmactagtgaaacmagttcatccgtacaacaagaagcaacgacgacatcagagagccagtgcgtantggtcccttagaaaaagtacgcagctttgggaaaatt

SEQ ID NO: 652 - DNA, 2533 bp; double-stranded, linear
agtacgccatgagcagccacgtgaaaaaggcatacaaccactgataccttttaaaacttttacttcggttacttgacccgagccatcctcgctagcccgaagccaagcataaagccctgtaatgtccataataatatagaagctttgtaaaagaacttccgcatatacccgtgtcactaacccaaaatagccaataatcactgcactgattaacccaaaaatgtaattgctgacttttccttgggcaattaaattcacacaaatgatgccggctaaaccacctactaacgtaatccaattcgatggattgatagcgaacgcaaccaactgtacccccaccatcaaagctaaaaacaagtaacttctcgtttcccaacctttaaaatcattcaccaaaaaattcttattcacgacaaatttccgaccttcctaaaaccaaacttttctctgttgacgtctcaataagagtactccgttttaaaaaacaagtcaatcagatttcggaataaaaagaagattttaatactatatattgattcgaaaaatatcraaacactacatatagttattaagcaagctttctgatatcctttattgccacaatattttcttcatcttgttttaatcttctatgtattcatggatttgtttccatctaataattcctgcagcagaaccctttacgacggtagcgcttcaaattaatattgcgaaagcggaagcaaccgcacatatttatacktcaaacacagccatcgttcactctttttattgaaatgcttaaaaattgatggccttatttctcgaatctggccacttattaacttattacatgaaaacattcgcctaaaaaagcaaaaaaaaacgactcacctaaataatcgacctacaaacaattcctktcatttgtaggtcgattatctttattaggtttgatacggatgtttcgccattcctagtttccctttactgctcatctctatttatttttttactgtttgccaacagctcgttgtctgaaagtactatccgtccttttgtactttgttcaaagctgtaagctkgckcaaataacgtttgcwctttattggcagtttgtgtaaaagtcagcccataaggttgtccttcactgtttttcgccaaaggaacagtcaattcaggatatcctgccacagcacttaaacccgtaccttcagaatcaataaaggcatatccgtctaattgttgtttttttagcaacgcatcaaacgtttgctgtgcttttttaatggttgtttgaatgatttctttatctggttgtttctttttaacatctgcttctaataaatcttgcccatactggcacgaacctttttatcttgttgattatacgcaattagttcctccagtgttttaaatggtaagtcataacgtttcgcaaattcttccatgcaaacttaaattcattggaaataactttcccaccatcaatcccttccatgtctggcgttaccggaatcacttctgctcctgctttttggagggcctttttagcagccgtaaattcttcttcagcacttggcatttctagcaacccaatgcgttgaccttgtaagttatttttagtaaatttcgttgaatcaatgtctcggaaccgtgtctttcttaaacgcattatagccttgcgcagcatcaacgacacttcgggcaatcgggccaactgtatctaatgacggtgccaatggcaaaacaccttcgccacttactgaactgtgggtcggtttaaaaccaaccactgattgatgagaagcgggggaaacaatcgatcccatcgtctcagtgcctaaagagaaggcgccgatattcatcgtcacactagccccactcccagaacttgaacctgaaggtgttattttgagcggcccataaggattaagtgtttgtccatgcttggaactatagccacttggtgctttcattgacatataattcgctagttcagataagtttacttttcctaaaatcaaagcttgcgcctctgttaacttcttaactacttccgcatcttccttaggcttgaacgtgcgtaaggcataagctcctgcactcgaaatcatgttggtcgtatttatattttcnttcaaagtcacaggaataccatacaaaggcttcttcggtgtttgagaggcttgctggtcaaatgccttggcttccttaattgcttgcggattgatttcagagatgctgttcatgccattatctatttgatcgaactgtaaaatacggtccaaataaaacgccgtaagttcttcataggtcaatgttccgttggcaatcgcttgctgtaattcagtgatatttttttcaataatcaacggtgctttggtccgagctttttgtacatctgtttcttttaattggtcttcaatcgttttaacgattctctcttgattgtacattgctggggtttctgcctcaggagtgaactttttgagtataaaccaatacgctgcagcgcctattatgactaacaaaacagcaattattccgatta

SEQ ID NO: 653 - DNA, 1447 bp; double-stranded, linear
aaacactgtgggtgaaaaatggccatcacgtgttctgggtacttttaattctagcgtgcctacacgtgtcgtaaagctgcgctcataatagccatttcgttgactttgtcggttttctgttcgttcatattcttttgcttgaatatattctgttcgttgattttccattagttgattaaataccgttgttaaaatatttttagaaacgtcatcctttacmgaatattcaataatgctttgaatctcttcgcttttcagtgtaaaatgtacttgggtcatgtaaaagtcctcctgggtatgtttttgtcgttaaaaacattgtaccgtaaaaggactgttatatggcctttttacttttacacaattatacggactttatcaatatttgcctaatataaatatttaagttcgctctaaacactaattctccagttgatctattactaaaatacattagtggcatactaaaaagtttatcaatataagaaaacattaatttaaaatcaaattcatactgaaattctgctactacagagctttttaagtattgaactacatataaaacagaaaaaaaactagttaatattaataacagaacataggtaggaatttcttgaaaagatctaatattatctatcgaatactttgttgcaataggaattaagagtaataaaagttgtgaaacaaatgataatattattaaactaaagaaatatcttttgaattttgtaaaaataaatgactttaaaaaaaactgtttccttttgccttcttttttagtctttttcttatgtgcgtatattaatatatttgaaaaattttttttgaattctgaaatatcaatccagcgtttattacttgcaggatctaagattaatactttcttcttttttattttctctatgaccacaaaatgttgattattccaataacttattacaggagtcggaagatctaaataatttgaaaaacttgatttaaatgtcgatacatcaaatccatattcgtcaaagacagtacgaatattcttgatagttagtcctcctttgggcaccccatatttttcccttagttctactagtgtactttgattaccataataattaagtagcatagtgatacatgccaaagcacattcactatgctctccttgcgcaacgtacttcaatcttttcataattacacctcttataactcaaaaagtaatgcattcggaatttcagaatctaggtttctcaataattcataacccacaccactgattcctacaaagaatcctagtgattctaaatactcacttccggcaacctttagtgtattatttttttcaaaatcatttagcatatagctaataagtttattttttttatactgataagtttcaggatcttttttagctaattgaattagcccttctaaagtacctgcatttccatggcacagacaa

SEQ ID NO: 654 - DNA, 581 bp; double-stranded, linear
tatgaaacacgaacattatatcgantatatatataatagttaatattttgttgtaaaaagatagcgattctcttataatcaagagtattattcgaaaactggattttaagggagagaagtgcaattatgaatacgtttttcaaattaaaggaaaacaagacaacggtatcaactgaaataatggcgggggtcacgaccttttttgcaatgagttatattttatttgttaatccgtccattctttcagaaacagggatgccttttcaggctgtttttttagcgaccattattgcttcaatcatcggtacattaatcatggggctgtttgctaatgtaccttacgctcaagcaccagggatgggactcaatgctttcttcacgtttacggtcgtttttgggatggggtatacatggcaacaagcattagcaatggtttttatttgtggtttgattaatattttgattacagtgacaaaaattcgcaaaatgattattaaagcaattccagagagtttacaacatgctattggtggtgggattggaatttttgtcncttatgtagggttgaaaaatgctggctt

SEQ ID NO: 655 - DNA, 533 bp; double-stranded, linear
ttttatcatagatcggaggttatgaggatgaagttagatatggtcggtattatcgtcaacgatatgacacaagcactctctttttaccaaacgctaggttttaacgtgctggaagaagcttcgcctgattacacagaattacaaaacaatggcgtcaggatttctttaaattcactacaaatgattactggtgtctatgggtttgcgcctagccagcaaggcgataaaatcgaacttgcttttctttgtgaacggccgcagaagttgataacaccgtgaaaaaaatgagccaagctggttacattgtttttaaagaaccttggaatgcaccttggggccaacgatacgcaatcattaaagacgtggatgcaaatttaatttcactctttgcccctctataatattactaanamatgcgccactttcgtttcttttactctctttcggaaagattagtgcagaatgggtcttaagtaggatgtcytttctgtcycttttttttggtataatgaaccttatccaatggatggggn

SEQ ID NO: 656 - DNA, 1061 bp; double-stranded, linear
gcacaagcaaatgacatttgaagaagtattgccacagattaaagcaggaaaaaaagccgtacgtaaaggctggagcggttttgaactttttattgaattacgtgatgaaattggcacctccgaangtgaatttttacaagttaccccgtattttttaatcaaaacttctgatgaaggctacagcatgttttcaccaacaccctgtgatgtcttagcagaagattgggtgattgttgaagcataactacacgcataaggtctggcagattacggcgattgctcgttcttccagaccttaattttataaatgtttaaaggagtttttcttatgccaaaagaatttgaaacaaaacgggtgcttgtaaccggtgcagcttcagggattggccaagcacaagcaattgcctttgctgagcaaggtgctgaagttattggcatcgacctagacgaaacggggttaaagcagacagccgcactggttgacccagattctgctaagtcgtttacttattttgtcggtgatgtgtcttctccctcatttgtgcaagccacgatgaaacaaattgtgaaaaacaacggccaaattgatattttattaaatacggcaggtattttagatgattatcgcccttctctagaaacttcagaagctttatgggatcaaattttagcaaccaatttaaaaagtgtctttttagtgaccaatgccatattaccttatttcctccaacaaaaaaaaggagtaatcgttaatatggcatctatcgctggcttagtagctgggggcggcggcgcasgtagcactgcctccaaacacgcaatcatcgggtatacaaaacaactttcctacgattatgccaaattaggcattcgagcaaatgcgattgcgccaggtgccatccaracacccatgaacgcagctgattttggcaggagaaggtgaaatggctgcytgggtagcacgtgaacacccgcgggccgttgggcacagccacaagaggtagcnaaactttcnttatttctagctagtgntgacgctgattatatccatggcacagtta

SEQ ID NO: 657 - DNA, 488 bp; double-stranded, linear
gaacagccgcaatgtgtcaagacacataaaagaactttctgttatttctcataaataacagaaagttcttttttatactggtttatttttttctaaagcattacttaaacgagcgaattcttctaaagacaatgtttcaccacgtctagaaggatcaatttctgcttcagctaggctctcttttagccaagccaccgtttgttcatctttcccataaaaatgcgttaagttattccacaatgttttacgtcttaattggaaactggctttggttaatttgaaaaattctttttcattggtcactgtcactgctggtgtagcacggcgcgtcaatttaataatcgccgagtcaacattgggctgcggcacaaaaactgtttttgggcacaataaaggcgacacttgcttccataaaatattggacagcaattgataatgagccataagctttcgttcctggtttagcagcaattcgatcagcgacctct

SEQ ID NO: 658 - DNA, 1906 bp; double-stranded, linear
taaaggngttattttaacggatactttttacaattattcggagcaagtgtagccaatattccnggaaggctttcaacaaatgncnctgtcattaccagataccgtcttggcctttttgcccagctttgattgtttggtctacctttaaagcatttaatgcgacgcctgtaatcgggattgttattggtttaatgatggtatcacccattttaccaaacgcttatgcagttgcaacaccagattctggcgtgaaagctattatggcttttggttttatcccagttgtcggtgcacaagggtccgttttaagtgcaattgctgctggtataattggcgcaaagattgaactttttttccgaaaaaagatgccgaatattcttgatcaaatttttacaccctttatgactatgttaattacttttttaatcatgattctcggaattggcccaattttgcataccgttgagttaggcatggtagatgttgtccaatggttgattgggttgcccttaggattaggtggtttcgtgattggtgcctcatatcctttaatggttttgattggtattcatcatacactaactatggtagaaacatcattattagcaaatacaggatttaatgcattgattacaatatgtgccatgtatgggtttgccaacgttggcagttgtttagcctttgcgaaaaaagcgcaagatagcaaagtgaagtcgacagccattggttctatgttgtctcaattatttggagttagtgagcctgtgttatttggattacttattcgttggaacttaaaaccgctgctatgtgtcttgtttacatcaggtttaggcggagcaattttagctatttttcatattcaatcaaattcttakggcttagccgttattccttctktcttaatgtatmtctatagtgcacatcaattagtgatctatttattagtcgcacttttatctgtcggtgtatgttatgcattaaccagtctatttgcaattccgcaagaagttttgatttcagataaagtaatcgaagaggaagaacgcgaagtctttgaaatgcaacacaataccttagatgaacaacttttttctccggtaactggttacgccatgaatcttactgctgttaatgacccagtattttcaagcgagatgatgggcaaaggtttagcaatcatgccaacagcgaacaaggtttacgcgcctgcagatggtttattaaacttggttgcagaaactgggcacgcttatggtatccaaacggacgcaggagctgaagtattaattcatataggaattgatactgtcacattgggacaggaggtctttcagacacaagtaacccaaggtcatcgtgttaaaaaaggagatcttttaggaacgttcgatcgaaaagccattaaagaagctgggcttgactcaactgtcatggttatcattacaaatacttcaagttatttaagcgtagagccaatgatgtcagatcataatgaaattacgccggaacaaatcattttaaatctaaatacacctaactaaacaaaagarcagcaagaagtagttatcacttcttgctgttctttttcttaataaaaaaccaatgattttcggttgtatttgtctatccgtttgtagtatgattgagtcagttttaaaggaaacatgccaagtatggaagaccatacttgacacgcattgactaattaaacatggggaacgttgccataagttgatgttccagtcaataatgcaagtaaatcmaaccatagcatgtacctcctttaattgataatcaaagtataaccattttgnaatggaatttaccatagataataccaagtggaggtctgtncgtggaaggagncaggaggccagaaattaaaccaagccggggaaanctt

SEQ ID NO: 659 - DNA, 1150 bp; double-stranded, linear
ggctgaaaaggggtggcttcancccaaaaacttttttgggcttccgcnaacgaccgctggtgggtcaagtcacngctggtggacttgayccaagcaccttgttttgatcgaccactgcttggttggtctttaaacagattggatcaatggtgtctttttcttttttcgcagtgtcagcaacttgttgtttttgatcgacaattgcttgtttctctgttacttgttgctgtttttcagtaatggcttgctccgttgtttctgtagctttcactgctggttgttctgtagaactgttttcaggtgtttttggttgcgcttgttctgctgcctgtacttcatttcccccaatacctgctacccccgttgcgactaaaatacttaaccctgcacttgcgatctttttcattttattttcctcacttccgattatttttgttgtaaatgggatacccattgtctttacgccattgttgtaacgctgtagttgttatatggaactcttccgctatttctttaaactgtaagcccattttttgataggcttcaaatctttccttgctaatatgcgaagaaaattgtctggtgtttgctgtttctatctttcttgcaagttcttgtattcgtttaaaacgctcggtatcttcattcctataccagtctgcgtcttcattcattaatgccaacatttctttacgccatatttttattaattttttagtcatacccctttcacctcaaattaacaataacaaaataatatttattatgaaaatagtaaccttttagagaaaataaaaaatgtcttttacatgacaattattaaatgccataaacaacattatctttaatttcaaattcaaaccattctgaaaaatcttgtttaaatccattgacgctatatttttcttgtaaaactacttcttccgcattcgcagggtctaaataggtcggtttatcttttggacgcgcataaacacctacccaacttgtaaaatccccctcaaaagcaccatcaatttcataaccaacttcttctagcttctgacgaacttgtttctttatatcaataatatctttaggaatataattttgatacttttcttgaaattccttaaaagctaatacttctttaccatagaacctttttatn

SEQ ID NO: 660 - DNA, 1175 bp; double-stranded, linear
tcngattntcttattattaacgtagtggcttattctantatccccaaaatccccactgtgtatttaatctaatcttaaactgattttcccacgaaagttttataaacccaaatattaatgactctggtctactttattaaataatccaaaagctaaatgacctaactcatgtacaaagatagacaataataaggcaaagtatgctatagatactaaatttaattcaaaaacaagagtaaagattacgagaagtaacgtaaagatcatcggagatataaatttcatctattttattctcacctctttgtatttaagcatgctatttttatctataaaagaaacagcattttacaatatttctatatgatctagtttcaacttctatatttgtttctaatgctgtaaaaccaatcccaatcatgcctcaaataactaaacttttaactaacttctttttcattagtattcatctcgaaaataaaaattagaaaacgtcttccacgcaagaattgtagctccattgatctagttttgtaaacattgagacaaaggtttctatctaacaattttgtaagttggtgcccttcgaatttgattaaattagattttattccgttttatttcaaggtaagtattaatacaagttttaatttttataaaaaaatgaatcttaccatagagatttactaactaattatttatactttttataatagattggaggttactatatgagggaaaagttattaatagggagtttttggttatcattctttaatattgtttgtaaaattctcggattcatttatctaataccttggctaaaatttatgggractatccacaatcaacaaactgctcaagctatttataatgttgcatacttaccttatgctttattcttatcacttggtacagctggatttcctagtggcattgctaaaaaaattgctgaattaaatattaatggaaataaaaaccaaataaaagaattgttcaaaagtggcttgatagttatggaaataatagggattctctctgctttantaatgtttatttttgctcctacattaagtaaaataagtccaatagttgatcatactgcgggtatcacagcaatccgtagcctttgtttttctntattaattattcctanacttagcgcactaagaggg

SEQ ID NO: 661 - DNA, 965 bp; double-stranded, linear
tagtccaaacccccttttatatagggccaggcgccttaggctatccactaacnanaaaatcggatntctgcccccttaatcattggttttcccccccgtcaaagctactaactgttgattaattttnttaatcttttgctcctcccatttgaattaaatgtcgcgattgatctcgttttcttaacaaaatagtttccaaaaaagaagcatccttaagttttctcaaagtttccgccatctcttcaactttaaaccctgaatctcttaacagtaaaatttgtttcaataaaggaatttgatgtgcgctataatagcgatatcctgtttttttatcaatttcatttggaacaaaaattcctgctttttcataatgacgcagcatccgtggggaaatatccattaacttggcaaattgcccaatttgatacatagagtctccttttcattcaattgatattcttatcataaaccttgacaccatgtgaaagtcaatgaaaaagtttctattcatacatttctattttatttgaatattcccgtgatctttctctagttattcagaagtatattgaggggtgaaattttggaattaaaaaaaacgatttccaacaaaataatgattattttaattgcaattatcgttgcaatctttgcaatgggatggattctacctattggcatcgataaagtaactaggttaagttaccgagaatacttatttagtacatatactgtatttacacaatttggctttctaatgttttcgtttctagtctctttctttattaataaagagtactcaggaaaaacaattttattttatcgtatgatgaataccaatagccttactttttatataaaaaaagttttgacacttacggtagagaccctaggcagtattctagttctgttatttatcgtttcctttatttttatggatttttctgtaatctgcaaatgttttt

SEQ ID NO: 662 - DNA, 1610 bp; double-stranded, linear
atgtaacagtttacaacgaagaataagaagactatnattatgttaactatttttaggtgtgcctaaaagtgaaatgtgtgaacaagatagattgagggatgttggatgaaagaacagaaaacggaaaaaatgcttaattatgcaaatggacctagtttagaagagataaataataccgtcgaggtacctaaaaacgcaagcttttggcgaactttgttagcctatagcggacctggcgctttagtggctgttggttatatggatccaggaaattggattacgtcaattgctggcggagcggaatataagtacacgttacttagtgtgattttgctttctagtttagttnccnggggantacaaagtatggctgcgcgcttaggaatcgtgacaggaatggatttagctcaagcgactagagagcatacaagtaaacgaacgggcgttgccttgtgggtggtgacggagttagccataatggctacagatatcgctgaggtaattggtggtgccgttgctttgcaattattatttggttttccattattaattggtgtgttgataacaacgtttgatgttttattactgntgctactgacaaagttaggctttcscaaaatcgaagcaawtgtttcttgtttaattgcagtcatcttttttgtttttgcttatgaagtggcattagcagatccaaatgttggtgaagtattacgaggttttattccagacacaaaaatagcgacagataaatccatgttatttttagccttggggatcgttggagcgacagtcatgccccataacttatatttgcattcttccattgcgcaacacggaaaatttgatcgtaacgatgatgttgagaaagccaaagcaattcgtttcactacttgggattcaaatattcaattaactgttgctttcgtcgtaaattgtttgttgttaattttaggaggagcattattttatggaaccaacagtgaattaggtaaatttgttgatttatttgatgctctgaaaaatccagatattgttggtaatattgctagcccagtgttaagtattctttttgcaattgctttactggcttcgggtcaaaattcaacgattacaggtacgctgtcaggacaaattgtaatggaaggctttatccatttaaaaatgccgttgtgggcacgacgagtgttaactcgtttgttagcaattgtgccagtcattatctgtgtcattatttatggcggtagcgaaacggctgttgaagacttgttactttatacgcaagttttcctaagtattgctttgccagtgtcgattattcctttaacgatgtatacaagtgataaaaaattaatgggccaatttgcgaatccagcgtgggtgaaatttttagcttggattattgctattgccttgacgttattgaatttatttttaatttatggcacattaactggtttaacgaattaataaaaacaaaggctgactagaaaagttagcctttgttttttcatagaatttgcgcgtaagaaatggtagaataggaaagatgaaatacaaggaagagaggctttcacgtgacagattatttaaatgtaggaaaaattgtgaac

SEQ ID NO: 663 - DNA, 1029 bp; double-stranded, linear
aaatttaggtggtggcggtcactttactaatgcggcagacaattatcaaacgtamcagtagcagaagtaaaagagcaactacttgatgtaattcgtcaaaatattaatgaaatgtatgaacaggagtgaaggaaatgaaagtcatttttttacaagacgttaaaggaaaaggaaaaaaaggggacgtaaaagaagtgccaactggttacgcccaaaactttttaattaaaaatggttatgcgaaagaagccaataaagggagcatgagtgcgttagcgggtcaaaagaaagcccaagaaaaacatgaagcagaagttttagcacaagcaaaagaaatgcaagcctttttagaagatgaaaagactgttgtagaaatcaaggcaaaagctggagaagacagccgtttatttggctcaattccttcaaaacaaattgcagaagccttaaacaaacaatacaatgtaaaattggataaacgcaaaatcgaattagccaacccaattcgttctctaggttacactaacgtaccagtcaaactacatcatgaagttacagcgaaaattaaggttcatgtcgtagcggaataatacaatcgataaaaaagaagccgatttctccggcttcttttttatgcaaaataaattactagaattattttttataatatttaaaaatcaaatatacaacaatttaaattaacgaaagtattatatttttattaattgtatatttttaaaaattggaaagtgaactaaaaatagagaaatcagcagagaaaaaatgtacttttttaatgaaattgtgttaaaatggatagactaaacgaaccagaaagtaagacatcgtgggagagaacaaaatgaatgaattattgcaagatagggtaccgccacaaaatattgaagcggaacaagccgttttaggttctattttcttagatgcagatgtgctaatagaagcgatggaatatgtggaacctaaagatttctatcgtcgtagtcatcagttgattttccaaacgatgatgac

SEQ ID NO: 664 - DNA, 567 bp; double-stranded, linear
ctttctcagaaagagaaatatgataaaaggagttgttcatatggactatgctaaactagcttccgacataattctagcagttggaaaagataatcttatcgctgctgcacactgtgcaacacgtcttcgtctcgtactaaaggataatacaaaagttaatcaaaaagctttggatgaaaacccaaatgtaaaaggtacctttaaaattgatggtcagtatcaggttattattggtgctggtgacgttaattttgtctatgatgaacttataaaaaaaactggcctttcagagctttcaacagacgacttgaaacaaatagttgataaaaataaaaaattcaatccaattatggcattaattaaactactatcagaaattttcgtaccaattattcctgcacttgttgcaggtggtttattaakggctctacgaaattttttaactgccgcgggtcttttkggaccaaaatcaatcgragaaagtatcctgcaattaaaggaatttcctctatgattcagcttatgtcagctgcaccatttatggtttttaccattctagttggtatt

SEQ ID NO: 665 - DNA, 2442 bp; double-stranded, linear
tttccgttttctgcagtgatgaagccaaagcctttgtctgagttaaaccattttactgtacctgtttccataataaatatcctcctagatgtgtgttataacacattcatattttgcaattacttgaaaggtgaaaaatgtggaagatgtttatttgaaacagctacccatattaccgaacaaaaactacatctattactatagcatactaactggtttttgtatagcgataaccttattttcttttttatcggatgttttttaaaaactagaaagtgaagataaggctgttatagtgctgtttcaataaggctcagaaaaaaagcccattgtaaggcgctttcttacaatgggctttttgcctgtttttaataacggaggatagccgctaaagatttttcatctggtgcagctttttggtctaaaacaaaaacttgaccgccgttttgaatgacttggtaagcaatggtgtttaaaagtttgcgacgatcatactcttcagatgacatttcattgttttcagtaacaaagagtgacgttgcaataaaaagatgggaaattttgccgtcagctgccgctggcgaaatatctgtaaattgatctaagaatttacgatctagtaatttgttataagaagctgtttctttttctgttaactctgcagctattttttcactagcgctgcggatatctkgaatggttgcttgtgcaggtgaagcagcaactgaaattgagcaatcataataaggatttttagcaatctttttaaagagtgtttggttttctggtaaagcataaagataaagcggtaatttttcaggattatccagttgatcttttaagaaagtatcgactgcttgatagtagttcacccaatcaatttcaacttctttatctttagtattgatgctatgataagcgacaccttctttagaaccgttagaactaccttgagttgaaaagtttaaattaccacccgttaattcatcacctaaagctgtgaccacgtctgttggcgcgtctttaggcaattcaacaggagtcacagtcgtatgatcaaccttgtaaagtttcattgaatcgcgatttagagcaagtaggtaataatggtagttaaattgtttgtctttgactagtccaagtaaataaggaatcgtgtccacgtaatattgatcgtcaacgggcacatctaatcgttgaacaaaggtgttttctggagataagatgattgaaacacttgctgtgccgttgcgccagaaggaagcatcagctagaagtgcgtcaattttttcttggaaaacagaccatttttcctcaggaaattttttttcaaagcgtgtttttgccgcttttgcaaaatttttcaaaacaagcgaatctttttctacgttttgatgagcgacatgggtgttaaacaagaaagtaacaaacggtccatgaacttcttcagaaaataatgttgataagctatcttttttttgatttgccataataaaatcccccttctaaaagtaagtgtagcacaggaaatcgaatgtttaaaacaatatgttcaataaaagaraacgctttaaataatctaaataaaggactgttaatggtgttctaataaaagttttataaaaaatatagctgaaactcatgataaaaaaggcacaaaccactatattacgttatgccaattatcccgaattggttttttcatacttactcctaccaagagtaaataacaaccttcatttccaccacagacgacggtcgtggtggttttttttgtttaggtgctagtttttttgctatcaattgactaggagaagtgaacgttctttaagaatttgtcatttcaaatttacggaaccgcaagaaacgatttgcttcttcctctaactgagtaatttcttcttctgttaactcttccgtagtaatgtgaatatgtaactctttttgtgtgcttttcataggtgcctgatgattaatctctgtttgttgggtgcggcccattaaatagtccaaggagacagaaaaatagtctgctatttttaaaagattctctactttaggcgaagaggtatcccaacgacgaatttgtccattggaaatgccgacgtttctttctaattgggcgagggttagtgctttgactgagctaattgtttaatgcgagaaattaaggtcatttcaagtcctccttgtgttttccgtttgctaattttaaattagcgtaaaagcgaatgnttgtcaattgcgagcgtgtaataagaaggtgaacatctcatgagtgattttttagaaaatttccgatgaaaaaaagaagaaatagagttattattagtaagtaaactgttttggagcgagaggggatgaatcaatggagaaaattaaaagttaccaagaggattctgaagtgcagaaaaatcgttggtggatcttagtttctgtggc

SEQ ID NO: 666 - DNA, 2413 bp; double-stranded, linear
ccaattcggnccagcctnttcgaccaatgttgcaccaaanataagtcntttagacaattattcatctgccgagggaaagcctagcacgagtgatcgggattcattttttgtaagaggaacgtcgagcgcaacaattcgcgcaccaaaatctgttgcttttaaagtcacaccatttttattcgtcagtgtgtaaagaagcattccttgtccaaatgattcagttgaaatagtcaaaataatcaatccttcctttaagtaaatatttagtaaatttaactttgttgtttagattatttaaatagtcaaaaagaaatgctaagaaaataaatctttatttaattgtattgtacacgttttcaattgaaatgacaattaagaaaatattaagtaaacatttgcaaaagtttagtaaatattgtacaatttgtttactagtgaaaggagcgattagtgatggaagaactgttaatgaatcgatttgtagaaatatttggtgagaaagggacagcctgttattttgcccctggaagaattaatttgattggtgaacatacagattacaatggcggtcatgttttcccagcggctattactttagggacatttggtgtggcaagaaaaagagacgaccaaaaaattcggatgttttctgataattttaaagaggttggtctcatcgaattttcattagaagatttaacctattcagattcagatgattgggcaaattatcctaaaggcgttttaaattacttgattgaaagcggacacaatattgattctggcttagatgtgctcttctacggtacgattcctaatggtgctggcttgtcttcttctgcttctattgaacttttaatgggaacgatctgtaatgatttatatgctttacactgtccaatgcttgaattggtgcaaatcggtaaaaaagtggagaatgaatttattggcgttaattcaggaattatggaccaatttgccgtagggatgggagaaaaagatcaagctattctactagataccaataatatgcactatgaaatggttcccgccaaattaggtgagtatacgattgtcattatgaatactaacaaacgccgtgaattagcagattcaaaatataatgaacgtcgtgcagaatgcgaagaagccgttcgtttgcttcaaaaagagttatctattgaatttttaggtgaattagacagcgagacatttgaacaatatcaagcattgattggagatccagcgttgattaaacgagcgcgtcatgccgtcacagaaaatgaacgaactttattggcaaaacaagcgctaactgaaggggatttggaagaatttggcttattattaaatgcctcacatcgttcgctaaaagaagattacgaagtaactggcattgagttggataccttagtggcttgtgcgcaagaacaaccaggcgttttgggcgcacggatgactggtgcagggtttggcggttgtagtattgctttggtaccaaagcaaaatatagatgcatttattgaagctgttggccagagttatcaagataaaattggctatgctgctgatttttatcctgcatcaattgatgatggtgccagaaagttattttagaaaggaaggctttaaatgtctattttagtattaggtggcgcaggctacatcggctcacatgccgtcgatcaattaatttcaaaaggctatgccgttgttgttgttgataatttattaacggggcatcgttcagcagttcatgaacaagcgactttctatgaaggcgatattcgtgataaagcttttttacgtagtgtctttgaaaaggaatcaattgaaggggtgttgcactttgcggccaattctttagtaggagaatccgtggagaaaccgttaatgtatttcaataacaatgttcacggcactcaaattgcgttggaagtcatgcaagaattcggggtgaaacacattgttttttcttccacagcggccacttatggcgaaccaaaagcaatgcctattacagaagaaaccccaacgaatcctaaaaatccgtatggggaaagtaaattaatgatggaaaaaatcatgaaatggtgcgacaacgcttatgaaatgaaatatgttgctttgcgttattttaatgttgcaggagcaaaaaaagatgcctcaattggtgaggatcacacgccagaaacgcatattgtgccaattattttacaagtggcattaggccaacgagcagagctaagtatttttggggrtgattatgatacaccagatggcacgtgcawtcgagattatgtttacattgaagacttgattgcagcacatattttggctttagaatacttgaaaaatggtggcgaaagtgacgtctttaacctgggtagcaacaacggctattctgttaaag

SEQ ID NO: 667 - DNA, 548 bp; double-stranded, linear
gccgnacccttaaatccggccaaatggtataattggtccnctggrttmcccaatarccctcttctcytctgtcacagtgcttccggctccacttgggcatcgcttagctaattttttcccataagcagtttgacttttagcatttttctttgcggcattcaaacgggaacgcgaacgtaaatctaacgcatcttcgccaaaacgttctaagtctggtttgatttgttgatattgtcgtctagttaaaggaatctcaggttctgaggttggaatattaaatttccgcaccgttggatcttcttccgtatctttcacttgaaaagccgttggttcatcatcaagaatgacatatgaacgacgatcttttttcattgcttttagcaactcttcttcagtaaaactaggttcctgttcctcaggaatcacagaagccgggatatatttaggaacaaaataagaaggtgtcgttttttgcactaatggtgatgcggcaggtctacttggtttcgctacgacttctttttttttatacgttttggtggtcccag

SEQ ID NO: 668 - DNA, 2119 bp; double-stranded, linear
tatgatgtgtggacttagtggtgggtatgcttcggtagaagccaaaattgacttttkgagaatacgatttaagacattrgatgttcggacagttgttgaaaagttgttgcatatggatatgaactggtttacttatgaacctagagggttttatcattatactgaaacattttcgtatagctctattcggatttttcggaatccagaaaacgtgaatatgggaattatgttggacttgtctggcgaaggttgtcgtcaattagaaaaaatttttgaagaagacaacaagcgatcgtggacagaattttttcgctcactctatgatgatgatattttcgggcaaggtgttttagttgatacaaaaataactcgaattgatattgctcttgatgaattgattgtgaaagaacaagaaaattttgatttatatgttttgaaagaaaaaatggaacaagggcttgtggataccacttttaagaattttgattttagcgggggctttgcttatgaaaataaaaaaatggtaaataaaggtttgtctctttattttggtagtcgtcaatcgccattgtattttaacttttaccaaaaagattatgagttagcacgaaaagaaagtataagtgttgaggaagcaagagaaaaacatgaaattaaaaatcggtacgaaattcgcctttctgatgaaaaggcgtttttgtttgtagaatattttctttctagtggtgaaacgttggattggctagtcaaggaaattattaatcaatctttgactgtctatgacattgaagatgatatgaaagtctattgcaaagcttggtatgatgttgttgataaattggaaggtttaaaattgtctgttcaaggtgaaaaaccgtctattgagaaaacacttcggtggttatcaaattatttagccccttcattaaagatgattaaagaaattgatcatttgttaggaacaaatgagctgatggaacgtatcgatttagcagaattaaaagagaaacatgaagaaataattgaaatggtctgtgttgatgcgaaagatttattgtttaccactaatcaaaatagcagtgttcgatcttatatggaacaagaatttgatttggaggaagtatatccattttaaagattaagggggatatgtatacacttgattcgttattttaaatagatatgagtttagttgaaaggaatgtatgaattatgagtagagaatttattgaacgcaatactaaagtagcaatttctattactgaaaaaatgaaaaaaggtaaaaatgatttacaaaaaacaaaagaaaaaattgttcaattagatgaacaaggggaattgactattccttatttaaagattacttttgaaaagttttcagaatcaaatgaagagcttttaaaagaaatttcaagatatgaatatacttatgtggttcatgaagcagaaatggcggttaaagagaaagcaatttgggaagaatttttcagtataaaaaaattgtatgataaagagctttcagaatttgccagttttaaagagaagtataaatattttgagcctaaaaatagtgaagaattaaaaaaacaagctcgagtgttgctagaaaagaaagggtatattgttgacagtccatttgaaggagattttgamagatggattggcgtttatgctagacctaaagataaaccaacttatttagatccaacggatggagaagaagctggattacaagaattgtacagtgtagatggatttaagcaagactttgcagaatggtttgagtttgaagttgtggaagggaaattaaaggaggacattttgtagtgaaaaagatttggcaattggtatgtttagaaaataattatgattcacacagctcttattttcgggrtatggtaagatatttttcctatacactgttagcactacttttatycyttttaggttkgwattttamcataggttgggtaagtggtttctgttttgtaggtttgatacttttaccatatatgggctttttatctcgtgataattatagagaatttgcaccgagagtatggaaaataagagatgttcgagagttagaagaattgtaatcctgtagttgttgatagag

SEQ ID NO: 669 - DNA, 1587 bp; double-stranded, linear
aaagattgacatgtgcaacaaccaattgtaattgttctttttctgccacctgttccattacgtcaaaagggccatggagtctacaccaccagaaacggcgaccacgattgtttgatgcggttgccaaaatccttgttctkttcctcgtttataaaactgccaaaacattgttcgcccttctttcttccttagaataaaagaggaaccgagaaataacccattcgttatccccagtccccctatttgtttgtgcttagccgcgacgtccgccacgtccgccacgtttgccttcagtattacgttttaatgaagataaacggtcatcactatctttcaagaaagagctcatcaatgagtcaaaatcttgtttattgttattgttatttgcttgtggtttattgaaaggctttttgccccctgcgcgtggantacggtcacgattctcataattgttttcacgacgttgaaattcacgttttggttgttgcccttctgctggctcttgtgctttacggatcgataagccaattttgccgtcgtcaccaactgaggttactttcactgttamttcgtcacctactgttaatacatcatgaatatctttaacgaatccattagacacttcactgatgtgtactaacccagtttttccttctcctaaatcaataaatgcaccaaagttagtaatccctgacacttttcctggcaatttagctcctacttcgattgacataaaaaaattgttcctcctattttttccctaattataattgcagtttattcagctgaagacttagttgtttcagttgaagactgtgattgactatttttttctgaactgctcttgctttcttccgctccagaagtctgtgtttttttcatttgttctggtgtgggataaatctgttcgccttcttttgagagaaggaaacggctacgtgctaattttgccacataatcatcatcttttaacaaagcaacgtctttttttagatccttgaccttcttatcaactgctacggattcagcaattgcatctgctcgttcttgtttgaaagcacctaagcgatgataatctttcatcaattggatgccagaaaaggcaaaaataatgaaggccacgagaaaaatcgctgccaagcgctgatgaatcccctaatgatttttatcaaaatcattaagttaaggtagatacacatcttgtcatatgatcaaatggtttcgccaaaaatcaataatcagacaacaaaatgtgcgaactcgatattttacacgactctctttaccaattctgccccgaattacacttaaaacgactcaacagcttaacgttggcttgccacgcmttacttgactgtaaaactctcactcttaccgaacttggccgtaacctgccaaccaaagcgagaacaaaacataacatcaaacgaatcgaccgattgttaggtaatcgtcacctccacaaagagcgactcgctgtataccgttggcatgctagctttatctgttcgggcaatacgatgcccattgtactgttgactggnctgaaattcgtgagcaaaaacgacttaaggtattgcgagctcn

SEQ ID NO: 670 - DNA, 620 bp; double-stranded, linear
caatatgataatcatacaaaagaagaacttagtgaaatgaatacagaagtcagcgttgctggacgtatgatgacaaaacgtggtaaaggaaaagctggtttcgcccatttgcaagaccgtgaakgccaaattcaaatttatgttcggaaggaccaagttggagacgaagcctatgaactatttaaacatgctgacttaggcgacttctttggtgtgacaggtcaagtaatgaaaaccaatacgggggaagttactgttaaagctcaaacaattacgttattaactaaagctttgcgtccattgccagataaataccatggattaacgaatgtggaacaacgctatcgtcaacgctatttggatttaatcagtaacaaagaaagctttgatcgtttcatgaaacgcagtcaaattattagcgaaatccgtcgttatctagatggcaatggctatgtcgaagtagaaacgcctgtcttgcataacgaagcaggaggagctgctgctcgtccatttatcacacaccataatgcgttagatatggacttatacttacgcattgccctagagttacatttaaaacgkttaattgtcggtggcatggraaaagtatatgaaatngg

SEQ ID NO: 671 - DNA, 841 bp; double-stranded, linear
ctctctcgtcactgcgtctnttggatcgaataagtcgtgcgtgtatttcgtgcgagctcccngncattctcacactaacgccgtagtactgtgtaagtgtatgatgacgagcgccgattctcctctgtaggagatctaccgaatccacttaggcttcatcgtctggtgaacaaggttcaaaatagtcatttttcaataataaataattaatcaaaagattcaccccgaatcaacattttttgttctaaatccattataatagaagtatgacacaatacgagaagaaaagcttataaaaaacattcaaaaataagtggccgcgataggtgaggcctcgttttgaaaatggtttgataagtaatccgttttttatatgaaaaagcaagcaaaaagggcttttagcacatatatttaaacgaaatgaaacatctgtgtacgttgatgaagtatagttatagcaggtggaatgaaaggatttgttgagagaatggtgtcgttttcggcaataatgttattttggtatatttttccggtaattgtgctctttgcgtgcaattttctcgtgtccactttttccctaacggaacttgggaaaataaaagcaccggatttggccattccgtttttattcatagggatccatgagttatccaaagatagttatgatgaatcgattatgccgtattttgtgatttctattttgttattaggagtcgctgttgccctgtttcaagcttattattatggagagattttatatagacgatatttccagaagttttggcggtgacgtttttacnaacgtttgggtggaaggggtgccaacctgccaaaaacagna

SEQ ID NO: 672 - DNA, 1377 bp; double-stranded, linear
acnaaatgtcttaaaaaaatgcttttttcntaaaaaaattattacaaaaaaaaacaagaagtcagccaagtattggctgacttcttgttttttttatttaattattcagctaaactagcttttaacgcttcaactttatctgtttgttcccaaggtaaatcaatatctgttcgaccaaaatgaccataagccgcagtttgtttataaattgggcgacgtaaatctagcatttcaataatgcctgctggacgtaaatcaaagtttttacgaactgcttcgattaatttactttctggaagatcactcgtaccaaacgtattaatagaaatagacactggttgcgccacaccaattgcataagctaattggacttctacttttttcgccaaaccagcagcaacaatgtttttcgcgatataacgcgcanattaactagcagagcggtcaactttggttgcatcttttccagaaaaagcaccgccgccatgacgagcataaccgccataagtatcaacgataattttacgaccagttaagccggcatctccttgagggccaccgattacaaagcgaccagttgggttgataaagtattttgtttcatcatctaaaagttcatgaggaatcacctcattgattacttgttctttaatatctttttcgatttgttctaaggttgtttcatcatcatgttgtgtactgatgacgatcgtatccacacgttgtggttgaccttgatcatcatattccactgttacttgagattttgcatcaggacgtaagtaaggtaagactttttccttccgcaattctgctaaacggcgaaccaaacgatgacttaacgcgatcggtaatggcattaattccggtgtttcgtcaacagcaaaaccaaacattaagccttggtcaccagcgccaatatcgtctttttcatcttgatcacgcacttctaaggctgcgtcaaccccttgagcgatatcaggtgatgctcatcgattgctacaagaactgcgacagtctctccatcaaatccatattttgctcgtgtataaccaatatctttcacagtttgacgaacaattttttggatatctacataagctgttgtagaaatttctccaaatactaggactaaaccagttgttacggatgtttcacatgccacgcgggccatcggatctttctccaaaatcgcatctaaaattgcatcactgacttggtcagctaccttatctggatgtccttctgaaacggattctgatgtaaataaatgtctntctgtcataatgttattccccctaaatagtttcggttacaaggcatctttagtaagtaacgacaattacttgctaaatcctttcgggaacttgtaacaaa

SEQ ID NO: 673 - DNA, 536 bp; double-stranded, linear
tgttaacgtgaactattattcatcgttttaaaacgtgtttccattaactccactgtattttccaagcattgagtaatatctttttttccagtatgaacttttcctgcaaatagcggtaacttgcctaaagccatcaagtcagaatttttcgggtcacagattycmasmtsacccactcgacaaagcgcatagatcagagacaaaattgtaaaagttttacctccaccagtgcctccacctaataacaaatgtggatctttatcaaagtgccaatacaaccctttcatcaactgaactttgccttcgtctgcttgcatatccttaatccaaatacgcttattgtacacatctgttgctaattcataggtaacaaaacctttttcatcaatcttatttaaattatctgcatgaaacgktgkttccaaaaaaccaccaatggtttcaaatttttcctgaaatttattacccgctgtttcaaatgaaacaaaaatactattttttgcagacttataataaatttttggaaacttgatttt

SEQ ID NO: 674 - DNA, 1079 bp; double-stranded, linear
cgattgactttctaacactacttccattataattagctttgttgtgttacaactattgtcatagtagctcagcaggatagagcatccgccttctaagcggacggtcgggggttcgaatccctcctgtgacgtaacgataacaaaagcgcctcttagaaaccttggtttctaagaggcgcttttgttatcccaagttcatcctaacctagtttaactttctaccaacttgaagtacctccacctccgccaaaactcccacctccgaaactgtcaccggagccatcatcagaagaaccctcgttgcttgtaacccaccaatcatgacgattcgcatacatactggtcttttttagttgcctgtcagaacgtgaacttgctagaaatttagcaatagacacatttccataagcaaaacgcatatcatagtattcaggatacgtantcttaataaatcttatcgggtagaaggattttgaagcttttttgttggtaatctttttttctctaatttttttccgcaataattttttttcaatttwatatkgctggttgtctaaatcgtttgcyaattgttttaatgattttgatttttctgaacttacttgctggatttcttttaaaaacctacggatcatagaatccaggtgcaatctattttgtaagccaacacctattgattttatataaccaaataagaaaaagaccggaatcaaaaaatagaccagactaaccatgggtactaaagagtcttcgtcttctaaaaatgtcagaatctctgtgattagtgtgaaaactgtcgaaggaaacgactgcyctgataaactaacttgaacataaataatcagagtcacggataccaaaaaaggatgttttaataaaatcgaaagaggaaacaaaataatttttaggtaagcagatattaagttatcattaattccactaatccgacacgcgggcagtttcttttctgggaactttttcccaatatacttcacctatccaaaaacgcgggtaagtaggatccatgggttngattcacccttcccaaaaannaggcacacatagaagaggcttcntta

SEQ ID NO: 675 - DNA, 1090 bp; double-stranded, linear
gtatgaattggaagacttaatgaaacggattccaccaatgtatgaagaattaaatgaaactttcccagatcaattaaaagaaatcgaagaaggctacaaccaattattagctgacgattatgtgttccctgaacaaaactttgctgaagaaattcaacatgcgaaaaaacgtgtcgagaattcaatggctgatttagagaaaacagagattgctgcagtagaggtcgcaaatcgcgacacagcaacggcgattgatgcattatatgaagtgatggaacgtgaaattgaagcgaagaaatatgtcgtgaccaatcaaaaaattattgacgattatatttctcattccttaaaaaataaccgtcaattaatgattgaattggaccatgtatcacaaagctacaccttaaacaacaacgagctaggacgtagtcgtggcttccaaacggaaattgaagaaattatccgccgtcaaaaagacttggaacctcgaatgaaagaacataccgttccttactctgaaattcaagcgttctataaagaatgctataagattttagatgatattgaaaatcaacaattagaaattgatgcttcattgaaagaactaagaaaaggcgaaaaggtcgcccaagaaaaagtcgacgaatacgaattccgtttacggagtatcaaacgatatgttgaaaagcaacgattaccaggtttgtctgctgattacttagaatttttctatgtggcaacggatcgaattgaagatttaagccgagccttaaataaaatgcgcattaacatggatgaaatcaatcgtttgtgtgacttatgcgaagatgatttagagttattagataagaaaacaaaagatttagtcmatgcagcagctctgacagaacaaatgatgcaatatgcaaaccgctmtcgtcatactcacgagaacatccgagcggctttagataaaagcatgtatttattctcgacagrattccgttatcaagatgcattagatgaaattggaacggcattggaagctgttgagccaggggcgttcaaacgaatcgaagatttttattttaaaaatancaataaccctaat

SEQ ID NO: 676 - DNA, 527 bp; double-stranded, linear
tatcttctttttccgttattgaaataattaatagcgttaataaaaataaaggaataaagaggaagtgcataaccatttgagtaacaactatcgatacagtaatcgtgtgcttgtcaaatagctgaactagtattggattaaaccaaacaatggcgactattactaacgaaaaatatttagtcacgctttccagccttattacatacaacaagccaaagaaaattagtaaactaataatgatatctttataagtaaaaaaatgttcataattcataatttctttcgtttcatctccactcaacttgcttaactattcaaggtttaggtaaatcacgtttcccattttctcacatgatcgttcaaagaaacagaacgttgtttggtgttttaaaacgtaaaagttgagcaacatatcctgtctaaacatttacttggcagtttatttatagaaaaattgttactttccaaatttttgtatgctttttagaaatgaaaccaagcttatgttttaatgcttcttatgcaaa

SEQ ID NO: 677 - DNA, 1493 bp; double-stranded, linear
acacggatnatttattgatccctaggtcattnggcgggattcaaattccttcgcataagccaggccattaaattmctcgtggtcatawgacyccttacaatatwcytttaaaaaagcttttatcatctggtgtcataatkgtgttatttcatatctcgacttaatagkttctcaaagcagatcgctcttcatcagtgacactaatattggtcttaaaacagtagtattattacgatttgacatattaccaacattgattctttttatctctaaatcattttcaataaatggtaataaatctacgggtgatttgacaatcatcagaacattttgtccttcatatttgccatttttaatattactaatagctgtttcttcagttatgatagacgaagaaattccagcaggaactgccattcttaaaacctgcttttgtaaatcatttttagcaacgttgtcgttcactaccattaaacgtgttactcccaatttattactccacattgtagctacttgaccatggatcaagcgatcatcaattctaatattgttaatacctttcatttccatcgaaaatgcctcccataaattattttattttaaaatacctagagccgctaaaacaattgacaataccataacaccaagaattaagtaaataggtttaacgttcttctttaatgcccagaaaactaaaccaactaataatgcaggcaataatccaggcattatttgatccaaaatatcttgacctttcattgaaaaattaccctgtttaaagtttaaagtaatattagctttaacgactgaaggtattaatgcccccacgaccattaatcctaaaatcgaagttgactcagttaataatttcaaacttttttctatagtagcaattaattttgttcctgaggcatatcctgcattaaataatggaatactaactaattttagcgctacacttacaacaatccataacaaaattccaactggactaccatcaatggccatatttgctgcaatagcaccaaatatagtccaaggaataactacaaataaactatcacccaaaccagctaccgggcccataaggcctgtcttaatagatgttacagcctcttctgtgttttcgtcagcattctcttccatagctacattaatacctaaaatgtaaggtgccacccaaggattagtattaaaaaattgtaaatgatttaataccgctttttgtaatgcttctggtttatttttatatgctatttttaaaaatggtaatactgcataacaatatgctagcgcttgcatcttttcataattagaagaaactgagcttgtaaaaaaccatctccacaaaacacttcgtttagtttttgtatcaatgcgtaattttaattgttcgatattattcatcgtcatccatcccccctgctatattaatcacagtattctttactaaatcttgactattttttttataaattattaatgcaatagct

SEQ ID NO: 678 - DNA, 582 bp; double-stranded, linear
ccaatggataatcctcctttaatttatataaacttatttttcatttcctgttagtaggtctatcatatctcttttgtaccaaaaaagcaagaaaaaaccgaacaaacattcgcatatttattttttattaatgattcggcgccgcaaaagatctaatcctcgcataaccgcactctgtctaatataatttcggtcacggttaaaatggaaacattctgcaacggttggttggccttcttccgccagcccaatccaaacagtgcctgtcggttgaccttcgagtgggtcaccagcgaccccagtaaatgataaaccatagttagatttagctaactgacgcgctttctctgccatttctttggcacacgcttcacttaccgtgccatgttcttctaaaagttcatgagaaattcctaaaaagttctcttttgtttcttgcgaatacgtcacgaagcctcccttaaaaatcttcgaagcacccgcaatttcccccagtgtactttgggataggccagcggtgaggctctcagcagccgtaacgggtttgncccgttttggtantaacaaatcnacggtaaacnt

SEQ ID NO: 679 - DNA, 1192 bp; double-stranded, linear
ctggttcgccatctttcattgtcatagtggcaccaattccttcaaaatcaccagataagctttcgtttaaatcattggcagcagattcatttagataagttgagtatgggtctccaatggcttcagacatgccttttaaggcgccttcaactaattcatttttatctacttcacctacataattggtactaatttcattatataaatcctgcactttgcttaaatcagcattggtaattgccccttcttgactcatctttttaacacgatgatcaaaataaatataactacttcctccagctaaaaatgcgacacagaggagcgaaataatatattgataaaaaggaacagttcgtttgttcttcatagatttcatctcatttctaacaaattcgtcactacttttgtttactataacatgaatgaaaaaagaggaaaagctttgtttgcttttcctctggatttatttattgttttcaaggtacttttcccataactcatcaaagatgtccatgttgcttaaatagtcagcattcatttctaaataagaagaaagttcatgataatcctcggtttgttttggaaactgaatatctttggccgcttcattggcaaaatcagtttcagaatctttagccggaccttttaatgtcattaagtaatggtaaaagcttcgtctcatgtaaattaatcactccatttttcttcaataaattcacttctacgttgatgggacaatccataacgcaaagcgtcttttttataaaagtcttgatggtattcttcagcaggataaaatggtgctgctggttcgatggtggtaacaattggttctgtaaaacggccgctattagctagacgttctttacttttctcagcaatttctttttgttcttgagaacgataaaaaataactggccgataattatcgccgcggtcttgaaactggccgaaagcatcagtaggatccgtttgttgccaatamatatccactaattgttcgtaagaaataatcgctggatcaaaagtgatttctactgcttccgtatggcctgttgtgtgtgttagaacctgttcatatgttggattaggcacgtgcccacctgtataacccgaaacaactgagataatccctggttgtgtatcaaaaggctgcaccatacaccagaaacagccgcctgcaaaaattgct

SEQ ID NO: 680 - DNA, 1442 bp; double-stranded, linear
gttatccacgagcgccttaaaatatgtccngggaatgtgcccgattccctaggcattacaaaaaccaagcctgggaaatgtgctttagctgcttattcccaaacagtttcctggaaggacttgtatacggcgattataaactgtttttttaaactaacggtacattagggatcgttgaatggttttaaaacaaaggagctatattatgagaaaaagtattttattcatgttgggaatatctttgttctcaatgactgcttgttctaatggggataaaaaagaagtaaaatcaaaagcatcctcstctactgttatctctgtcaacaaagaatcatctggtaatacgaagaaaaatgaatcaaattcaataactaaaacgtctaacgttgtttcttctacatctgtggaaaaaacacgtggaagtaagtttagcgattttatkggttggggtattcmaagtggaaacctttttttattaatgaagatgggacatattcaaatggtcaagtagaccattcttcattaattgccttaaatttagtattttagcagacggaagaaaatcaatgagctcaaatttaggaactctaattaaagaatctgatggcaccttaacagatggtgaactagtctttcaaccacttgagtttagtaacaaagaagatttccttgcagataaacaaaaagaatacaaaaattctcccgaaactaatgcacctgagaacgaagttgaaattactaatactatagragatatcactaacggaagtatctctactgacacaaatacgctcacaggattcttaaatgtgtatggtatgagtcctgcagcttataaagttactattgaaggaatgagtgaagaagaagctttaagaaacacacctaaagaaatgaaaacttctgctgaaatacaattaggtatctctaaatatggtattcaataatttgtctacgatttataattaacattagccataaaaaatacacataggasrctaaaaaatgagtgcatttttaggtctatcatctttattaggattattcgtaacttctgtatattttgtttactgtatttttaagaagagaaataatttatcctattttgtatggatttatatgattcttattggattatttttcmctgcgttagagttatttattccaggtactatttttcttactatttcattgtataaaatattaaaagakccaaaaacaaaggaattgctacatgagcaagaaataaaacgaacmgaaaaaataatagaaaaacaaaaccctattcaagaattcacagaaagtaattcaaacgaaaaagatctaaatcagaaagttgcttcaacatattctaacgattattatccctcggataaaaaagctgggctattccatcttggcgtctattgtccttattgtagaagccttaacgtccaatatat

SEQ ID NO: 681 - DNA, 3919 bp; double-stranded, linear
ttgctttacgcgccggcatggacgggcggcttgctccgtgcggaagcnagcgacgacttttccggcgtggccgcaatctatattgacggcgagaaatacnaccgattttaaccaacggcacactggacataccgctgcgggatttgccggatgattacgaacagctttccgtgcaggcggtggacgctgcgggaaataaatcaaaaatcgtgcaggtcaagaaccccaactatcaggcggaggataacaagcagaagccctccaccggccagacacagcccccggcgaccaccgcgccggttacatccaccacgcctgcgccaacgacaccggccaccagcgcaaccacacccccgactacaccgaccaccaatccggcaacaacgactgccacaaaaccggctgccggcacgggcagcgcaaagccctccgcttcggcaagcgcagcccggacgaagaaacggacaccacgccccgcgatccgatccctttgaccccggacggccaggctaccgttctggacaacgccaccggtgaggacggtaaggagttttataccatccagacaccggatgaaaacgtattctacctgattatcgacaaccagcgcgatacggaaaacgtgtatttcctcaatgctgtcaccgaagccgacctgatggctcttgcagtaaaagaggacgatacgccgcagacagacgcaatccctgacccggagccggcctgcatctgtacggaacagtgcgccgccggcgaggtcaacaccgcctgcccggtctgcaccctgacccggaaagactgtaccggaaaagcccccgtgaccgacacggaaaccgaacccgacgaaaagccggaaaaaacgaaaagcggcggttccggcacactgattttagtgctgcttgtggcgctggcggctggcggcgctggctactacttcaaaatttacaagcccaaaaaggatttggacgatgcagaggactttgacgaactgaccggcggggacgaggaggaaacggtcaacgaggacgaggatgtggacgcgcaggaagaaacccggcagacgggcgatgaggaaccggcagcctatgacgagccggaggaaccggactatcctgaaaactatggcggggaggacgactgatgcgctttacggacagcccttttgagcggatgatgacccaaaggccggcccccagccgcgccgcgcctgcctcccccgtccatccgcccggacacccttgccaccgctgtccctacgggctaaatgcgccctgcgtggggatatgctacaaaaatctgaaaaaggagcgtgagaaaaatgcagttagtgatcgcggaaaaaccgtcggtcggaatggcgctgtctaaggtattaggcgcgaaaagccgtggcgatggttacatggagggcggcggctggctggtaagctggtgcatcgggcatctggtggaacttgcccccgccgatgcctatgacccccgctattccaaatggaactatgccgacctgccgattttaccaaaaccttggcagttccaggtgctgccggacaccaaaaaacagtttgaagtcttaaaaaccctgatacaccgggccgatgtcaccgccttaatctgtgcaacagacgcaggacgcgagggggaactcattttccgcctgacttaccatctgtgcggctgcaccaaacccgtcaagcggctgtggatttcctcaatggaggaagccgcaatccagaaaggcttcgacaacctgctggacgggaagaactacgacaatctctacgccgccgctctctgccgcgccaaggcggactggctgatcggcatcaacggtacgcgcctgtttaccacactgtaccagggcaagtccctgaacgtgggccgggtgcagaccccgacgctggcactgctggcagaacgggaagccgctatttccggctttcagaaagagaaattttacacggtggagttggaactggagggctttcgcgccgccagtgaacgctttgcatccaaaacggacgcaggcaggctgcgtaccggctgtgtgggcaagcctgcaacggtacagacggtttcccaaaaggagaaaaccgagcgcccgcccaagctgtacgatttgactaccctccaacgggaggccaaccggctgtttgactacaccgcccagcagacgcttgattatctgcaagccctctatgaaaagcggctggcgacctacccccgcacggacagccggtacttgaccgaggatatggcggcggggcttcccgcgctgtgccagtccgtcgctgcggcgctgccctttgcggcagatttgtccttgccggtaaatgccgcgcaggtaatcgacaacagcaaagtcaccgaccatcatgccatcctgcccacgacagaagcggcaaaaaccgacctgtccgcgctgccctccggggagaaaaacatcctctttctggttgccgcccgtctgctgtgcgcggtaggcgaaccccatacctatgcggaaaccgctgtcacactggaatgtggcggcgctgtcttttccgcaaaaggcaaaacggaaaccgccgcaggctggacggctatggagcaggctttccatgccacactgaaaaagaaaccgaagcagcccgaaccctccccgccacttcctgcactcaccaagggccagaagctgaccgccgggggtgcatccatcaaagagggcgcgacctccccaccggcccattttaccgaggacacgcttctctccgcaatggaacacgccagtgcaaaggagtttgcgaaactggaagatgtggaacacaaaggacttggcactccggccacccgtgccggcgtgattgaaaagctggtgcgctccggctttgtggaacggaagaaaaagcagcttttccccacggaaaaaggcacggaacttatcaaggtaatgcctgatacgctgaaatccgtcaagctgaccgctgaatgggaggaacggctgggcgcggtggagcgcggggaactctccccggaggactttatggcgggcattaccgccatgctcaccgaactggtaaaaagctatcagggcgtgaccgtggcatctgccgccctgtctgcatccgggcgcacggtaattggtatctgcccccgctgcggcaaaaacgtggtggagggcaaaaagagctttttctgcgagggctggaacgtgcgcccgcctgcgactttgccctgtggaagaacgaccgcttttttaccagcaagcacaaggaactgacccgcaaggctgccgccgccctgctgaaaaaagggcgcgttgccatgaccggcctgttttccgagaaaaaaggcgtcctctatgatgcaattgttgtgatggaggacaccggagagaaatttgttcgctttaagctggaatttgacaataacacacctaaaaagaaaggaaactgacgcttatggaaaagaacatgaacgcatttaaccgcaacctgcacaacctcctgaccatcagcggcacggatgccgctgaactggcgcagacccttaacgtggaactgccggagatcaaccgctggctgmaacstccgccgcgccggatgtgtaccagcttcaggaaatcgccaagcggttcgggatgccctactcctacttttttgagagtgagcagagcctgcccaatgtgccgaaagtagcggcatggctgggcttgtcggaggaaacggtggaaaccctgctggcaatggccgataccgagccggaggatgtcatggacgcgctggacgatgccatttatgcaatggctaccgctgtcagtgctgcgggggaggtggatacggaatgaaaaaagaagaagcgaaagacatccctatcggcggagaaatcgctgtccggcaaactggcgtcccctatggctggctctaccggcgcacggaac

SEQ ID NO: 682 - DNA, 1338 bp; double-stranded, linear
ggtccgtccttgatattgaacggttaacgcttgtaacagctaagttaaagctttttctcatgaaattcctccttttttaggtttgccttaaaatcagtataagggatagtttaagaaaatgcaaataatttttaggcgcacctaaatacaagcgcttttttcacaaagaaaaccgtttctttcaataaattaaggaggatcccatgatttttatgacaaaaaatggtagaatatgcatgaaaacgactattattttatattgacggaggatatcatgaccgaaaactatcaagatggacaccttacgcatcttcagtttaaatgcaaatcgaccacttggctgaaaaaaatcgcgncatcagtaggaacagaattaggaaaaagcaccgtgcgccaatttagtgatggcgaaattcaaattaatattgaagaaagtattcgtggcgatcatgtctacatcatccaagcaacgaatgctcctgtaaatgatcatttgatggaattgcttattttaattgatgcattaaaacgtgctagcgcaaaaacagttaatgttattttgccttactatggttatgctcgccaagaccgcacagcgaaaccaagagaacccattactgcgaaattagttgctaatatgttggtagaggcaggcgcaacacgtttgttgacattagacttgcatactgttcaagtccaaggattttttgatatcccagtagataatttatttacaatgcctttgtttgctcattattatcgtcaacaagcattagtaggggaagaaattgtgattgtttcgcctaaaaacagtggcgttcaacgcgcacgtagtttatcggagtacttagatgcgaccttagcaattgtcgaccatgaagagatcgatggggtgcgccaagaaggttacgttattgggaatgtcgctgggaaaaaatgtattcttgttgatgacattttgaatactggtcaaacgttagccacagcggcggaagttttaatgaaaaatggtgcgcaagaagtgtatgcttgcgcctcgcatggtttgttatcagaaggcgcaaaagcaaccttagaaaatgcgccaattaaggaaattagtattactgactctgtttatacgacagcasaccgccaaccagcaaccttgaatattatttcttgcgctgagttaatgggggaagcgttacttcgtatccatgaaaataaaccaatgagtccattattccgtttagaaccaaaaggagaataagtgattccttaaactagaaataggtctaacaactttaatagtgttgggcctatttttcttatctctttataaatngaagagaaagt

SEQ ID NO: 683 - DNA, 894 bp; double-stranded, linear
ttcaatgaatagaaggctgcacctaatgtgtaagacacaccccctgcgaccaataacgctgttcctgtaaacccaagagattcatataacggacgagcagctatgatacagagccaacctaaaacaatataaataatcgttgaaatgtttttcactgtttcttgtttatgcaacgtgagggatttatagacaataccgacgatggcgattaaccagactaaactaaataaggtccaacctaaccaaccgccaatactaattaagcaaaacggcgtatagctgccagcaatcaataagaaaatagaactatgatcgaagacctgaaagacctttttggctcttgtaaaaattaaactatgaaataacgttgaagataaaaaaagtagaatcaacatggagccataaatagcataagataccacgtgaatcggtgagcctaaacgagctcctttaacaagtaaaatgactaagccagcaatacttaaacctgcgcctatgccatgtgtaactgcattcaagacttcgttcacgattaggtatttttttgagaaatgcgttttttccaataaattcacttcctttattttaatttgatgaaaaattcggcagtgtctgttatactataactagataattaaccgtttaatggtattctaccatgaaaacaggttccttttaaagaaagagtgtaaatttatgacaaacgtaaaatcgtacggttctcatgacgtggaaaaagctagggtgattaatatcatatgtgcttatcattatggtgtgggtgttatcagtgtgtcattgcagcgaaattatggcagtggcaatggaggctacccaacgngcaccccattgggatgngatantgtcctgggagtgcggagattcgtccagcaa

SEQ ID NO: 684 - DNA, 644 bp; double-stranded, linear
gtaacgatcgtattgacaattgaccttaattacagccattagcaccgctgccccaaaaacttgagaagccaaagttcatttcccccacaaaaaacgaggtcatttgtaaaatcgctgcattgacaacaaagctaaatagaccaaacgttaataaagtaaatgggagcgacaagattgttaagactggtttcaccaacatatttaggattgagagaacaaaggcggcaataattgcaggcattatgcctctcacatgaatcatgccaggaaaaacaactgataaagaaatgaatgtcagtgtattaacaaccaatcgctgaaaatatgtcattaaaagtcactccattcgtcatcatcaattttttccgcttctttacgttgctttttattggcagcataaggattttcattgcgaacatttctattataaggattttgatggccgtagccgcgatcgcttcctgttcttccagaagggatcaagactgctaaagcaatgtataagagaatgcctggaaatcctgctgagaaaaagctgagcmagacataaacgacacgaataattgttggggtcaattcctagccantcagcaatcccagctaagcttcctgntaaaaccacgttattcggagattttggtagt

SEQ ID NO: 685 - DNA, 501 bp; double-stranded, linear
gcatttnntagtgtccgattcgncttagaagtattttcaatcgtaaagctaataaaatttcgttggctttccgtttaaaggtcgttycatcagttaaaatctgktgcttgrccaattgckgagtcaatgttgamccmccrgagaccgcsgatacctgtcgcatcagaatcaacgctcgaactagcgcttttggtaccacccatgatgttcytcmaaatatcatcttctgtggaaataatggctttttttagcatggagacatttgatcgccattaattcgtgtccgaattaaatctgatttgatgttagcaatcggagtaccatctgcgtaagtcatttttgacacttcggtaatatcactgatttctttttgcaattcttccttcgttgggggctgtgtatcttcaactagaaaagcaaaatagcccattccaatacctaagccaagagagccacctaagacaatcagataaccccaaaaccactaatgctgaaaacgcg

SEQ ID NO: 686 - DNA, 829 bp; double-stranded, linear
ctttgtaattgatgtacgccaaaatcctggtggactgctagatcaagcagagcgaatggccaktatgtttttaaaaaatggcgaaacaattgttcaatttgaagacaaaaaaggacgtacgatgaaagaagttgcttccaaagaattagacggcggctttaaagtaaaagaacctgttgcagttatcattgatggcaatagtgccagtgcatccgaaatttttgctgcagcactgcatgaatctgcgaatgtcccattaattggaacgaaaacatttggcaaaggaacggtccaaacggtgaaagatttaaatgaccaaaccgaaataaaattgactgttttaaaatggttaacaccaaaaggcgaatggatcarcgaaaaaggaattgaaccaaccatcaaagctgattaccccgagtatgcctatttaaaattgattcctcgcgataaaacgctaaaagaaggagatcaatctgaagatattcagaacttaaatgctattttagctgtattagcgtatcctgttgatgaaaacaatgcaaactacaccgcagaaacaaaagcagcggtwagcgatcttcaacagaaaaatggcttgcctgtaactggagaaatcgacaatgaaacagccacaaaaattgaagccactttaggtaaattaattcttgaaaatgacgctgcttacgatacagcagtcaaagaaattcaaaaaaactagaaaaargtggcacgaagttgaagaagaacgtgattatgttgggtatttaatgkacttyctgaaaatnttagtaccagcatcgtagccgtttttattttaagrggttttccc

SEQ ID NO: 687 - DNA, 485 bp; double-stranded, linear
tagattctataatggtgacagggctagtaccatatttagcgatgaaagataagtcagattcgaaggatgaaggggttaaccttagtgcgttaaactttaaagagcaaagcgtaccgttcaagatattaaaaattaaaaatacatttactgatgaaatgcgttttgaatatcaaacacacattatggatactgcaaaaaatactccaattatgaataatgaaaaaattagttttatcagctatgaaaaatatatagttactggtatgaaaagtattttaatgaaagcaaaggattctaagaaaaaaatattggcatatattaataataatttacaaaatcttatagttagaaatgtaatcagaccaactcaaagatatgctgatatgttggaattttcataccatcctaattgcttttctaatgcaatagagagagaaaaagtacttcataatakgtggggcctatcccttataaggantaaaaag

SEQ ID NO: 688 - DNA, 970 bp; double-stranded, linear
ctatacgccacaaacaatctccaacatgagtaaattggtggctgaagatgttttagcttttaaagamagaacgttagaagccaattattccgttatatttatggatgcgacgyatatccctgtgaagcgacagactgtttcgaaggaagcagtgtatattacgattggtattcgtttggatggaaccaaagaagttcttgggtttactattgccccaactgagtctgcttatatttggaaagaagttcttcaagatcttagaaaacgtgggttagaagaagttttattagtagtgacagacggattaagcggtattgaagaaagtatccatagtgtgtatccgaatgcccaatttcaacaatgttgtgtgcatgtatctagaaatatcgctcataaagttcgtgttcgagatcgaaaagaaatttgtgaggatttcaaattggtttaccaagcgaattcaaaagaagaggcattggatcacatcgactttatgattaggaaatggaaaaagcagtatccaagagtcgtcaatttactcttgaatcctgccctattaaccttttataatttccctcacgccatcagacgaacaatttattcgacgaacctgattgaaggctttaataagcagctaaaacgatatactcgaagaaaagaacaattccctaatgaagaatctctagagagattcttcatttctcaatttaatcaatataaccaaaaatttttaggtagaattcacaagggatttaaagaaattcaggatacattagagtcgatgatttaactgtaattaacagaatggattttccatttacacataattcttgacgctaccataatctaaataaccatcatattcatctactacttatataattgagttttattaaactttttaagtttctattctatcaaatatttaaacaatctctgcatccgaaaagactacctcgtatagttttactaa

SEQ ID NO: 689 - DNA, 383 bp; double-stranded, linear
ataaacatattggtaaaaattatgtctcttcaaaaaatccatctgkttttgaaaattttctttatccgttatatccatattagcatctcccttttttaacgattactattgcttattctatcgactttttccctattatttactttgaataaatcctctttttattagtgttgttaatatagacgaagcacaccgcaaaacagcgctttcataaaggacaactataataagaaataatagttagttttattaaatcataaatacagctaaaataaatcatacaaaagtcctaaatcaagttttattttaagtktctaactttgattgckttagttaaaaatgacacmaccatcttatatcntattccataccattttcntaat

SEQ ID NO: 690 - DNA, 850 bp; double-stranded, linear
gnctatgttgagaanaaagtcggtaaattaganagatatttccagcgattcacctgaagcaacggttcacgtgaatttgaaagtgtacactgaaaaaaacagccaaagtcgaggttactattcctcttccttatctagttttacgagctgaagaaacgtcacctgatttatacgcaagtattgatttggttgtcgataaattagaacgacwaattcgtaaatttaaaacaaaaatcaacagaaaatctcgtgaaacaggacgtaacaatacaaaagccgctgtcttcttagttggtgaagaaacagaagaaacaccttcagaattagacatcgttcgtacaaaacgtctatcattaaaaccgatggacagtgaagaagctgttttacaaatgaacatgttaggacacaacttcttcatttttgaagatgctgaaacaaatggaacaagcattgtttaccgtcgtaaagatggcaaatatggcttgattgaaacagactaaagcttaaaatargagctgaaatgccttcgtgcatttcagctctttaaacatctttaaagcacggagtaaagaaaaaataaagaaatacataaaataactttaaaagttcctcttttaaaggaaaatgtctgtaaaatagagagaaatggttttctttctcgtcaagtaatgataaaataaaacggatagattgtgcttcttgtacaaaaaggatacaaaaataaaaagaggtaattgaaaggacacagtaccatggcaattttttgaaaaaatgtcgaaacgtaaaaagattagcgttgaaaaacgcgtaatgtcctgcaggcatgacactacgtgacattcggaaacgt

SEQ ID NO: 691 - DNA, 1426 bp; double-stranded, linear
atactcacctacatcttaattccaactaaacttaatacccatttaacaactgcaaaaatattttttccttgattcgtcgcaaagtcctgtaaaattaaggcaatgacaattactgaaccaatttttgcccattcggcacctttccaatgttttaaaatcaagataatcgcaccagccgctaaaattgtaataaaacctgtacttaaaaaactactcaaattgcctgtattcattagtcatttccttctttctctgtaaagtaatgtttcatcgtattaataaaataagaattctccgttttagataaccaaagcgaaaaatcctcagtatgcgttaattttgttgttttatctgaaaaagtgaccgatacttgaacccctgttacacctttctgctttgtatcaaaaaatttcatatcaccagaatctattgaaacaaatgagtcttgacctgctgtcgttgttggatttttcattaacaacattaattcttgtttgttcccaactgaatattttgtaaaaaacatctttaaaaatttctctatagattgtttttctttcccatcaacatctattgaattttctgtctgttttagagatactgtttttccttgtggtaaactacttgctacaaaataaggacgtcctacaattgaaaacaaattatcttttacttgaattggtaaaaccatattctgtgtcacattttcagtctttttatctttctccaattcataattcacatttagataaaccaaataacaatcttccattttctctatacgtgataaagacgtatttttaaacgtacgtaagacattcccttgtagattttctgtttcatcaacatcttttacatctagtgataaatatttagataatcgatcaatacgagcctttttagcttcatcacttgctttagagttgtaatttaaatactctttcgcaaaattttcgacataaaaagagagggctgaataatcaaactcctctcttacgacgttattcttttttgattgttcgcttaatgtatccacttttgaatataaactatctacattacttgccatcacattggcccgaatcgcaccaactcctgacatcaccagtaaaacactagcgccaattaacacaacccgattcgctttcttttgagaaaatgtcttaacctttggtgttttttcttttttctctttctttttaattttctttaaattcatattcccctcctgcaatcaataaacctaaacaactttcaaatgattttaaaaaggtagatttaataactttttcaacataaactctttctttaacacgacctttatatgtttgaaagccttctttatacaaataaaaataatatgaattgtacattttatctccattaggttttctcaagtattgaccttctgctattaaactagtta

SEQ ID NO: 692 - DNA, 540 bp; double-stranded, linear
aataaagaaaatgaaattctaggaaataagraaattactactaagcagaccasatgttgaggggaaagatgatatttcanatagtcgatttgctctttggcaaagtgcgatngatttaatgaaattaaatcctatatttggcacntctccaaaaggttttgcagatatagctaaagataaattgcctcaatctcatattgctaagacagctcaaacaccgcatagttttttcttctatttattagcagctacagggatttcaggtacaattgtatttctaattttcttgctatctaaaatgtttaactctgctaaattgctgtttagcgttcgaattaaaaattatatggattttgtgttagataaccaaattgtgttagtcattttaatttctggattactgataactgaagtcattttaacaagacgttttgcaacagttatcttttggttatacttaggtaaaattcagtatcgcactgacatggaaaatgatttgattagaggaaatgagcaatgatgctcattttttctactata

SEQ ID NO: 693 - DNA, 483 bp; double-stranded, linear
gaaaaacaaaaaggtgtcatgacatctttaggaggcagttttaatgaaaacaaactcagtaaaacgtttaacaatttcagcacttttaattgcaatggggattatcattccaatggttatgccaagaattaccattggtccagccagttttacattagcaagtcacgtcccagtttttattgccatgtttatttctccagtggtggcaattgcggttagtctaggaacaggttttggttttttcttatccgcaacaccgattattgctttgcgggccttatctcatttgatttttgcagtcattggcgcatgattttacaaaagcatccagaaattttaattaataaagaggggaaattcactttattaaatggaaaattacagttgtttaacgtgggaattggagtgattcattccgctgccgagctagtggttgttctgtatttacacaatgggcaacttgccaggaacctatnatacagc

SEQ ID NO: 694 - DNA, 416 bp; double-stranded, linear
aaatgaaaaattgtctgacggggaaccagctcaatttgatgcaaaagaagaaacgttttggaaaaaaatttcgcaaaaagttattttataaaagtaatacatacgaataagagcgtacacatagaaagaagcgtaagcagtttaacactgcttacgtttcttttttaatgaataggaataactgtttcacgcttaattaatttgtgaggaataacgagacggacaccatttgtcaattcttcgtggattaattcatataattttttcatcgccattcgacctaattctgacgtgtcgatgtcaatgcttgttagataaggatgtgtcaatgttggaaaagattgagttgttaaaactaataatggataacgtttccrggracytgataaccawangatttgcgcaagttgcatcgg

SEQ ID NO: 695 - DNA, 1442 bp; double-stranded, linear
gcctgatacatacatttccaacattgaagccatgagggctttttcgtttcgttgataacgttcaaacactgtgggtgaaaaatggccatcacgtgttctgggtacttttaattctagcgtgcctacacgtgtcgtaaagctgcgctcataatagccatttcgttgactttgtcggttttctgttcgttcatattcttttgcttgaatatattctgttcgttgattttccattagttgattaaataccgttgttaaaatatttttagaaacgtcatcctttacagaatattcaataatgctttgaatctcttcgcttttcagtgtaaaatgtacttgggtcatgtaaaagtcctcctgggtatgtttttgtcgttaaaaacattgtaccgtaaaaggactgttatatggcctttttacttttacacaattatacggactttatcataatttaagtaatactaatcaatgaaatttgaattttgaaatagttatttattttcattttaaatacgtcttttaattaacattaacctatgattgactataataaaaaataggctctctttgtatagaaagtctattaaattttaataatttatttagttgacaataagaatataccttcagcaattttatttttagtaataggaattacttctgaataacctttagagtttgttataataaccattattgtatcataaaggcctgaatttttgatcattgggttgtccaatgttccaagaacctccccctttttactttttgattagcaacaaattttttagcgaatcatttactacttaatgatactgtatcaataccaatattaatcagtaacatgtccagtttcaaatagaacttgaacaataccacatctactggagaataaatagtgtttctatttggcttaataggaactattttcttattgttgatccgtcttgtgtttgtattgaaaaagaagaaataatgagggatttaaaattagcaaaaaaattggtaaaatgaactaaggtaacgatcgcaccctcaatataatagtgtcatgaatttaaacctcgatttttttgcggttgttacctttttattttagggtggaaaataaatgtctctttatttctttttgttatttcgcaagtgataaactcctgttaagatagtggctatataaaaaaggcagatacttaagaagagtatattcatgatttcctcctagtttaaatgaaagtcatgaatgattgtaccaagattttttagagaagttaagattgaatagaaaagtaaatacgataraatttttatagactgttacgttgaaatgttcttcagagactatttcttccaataccncctactagataggtggttttaatcattattttcggaggttgtgttttggccaaaaagtaaagatttaatggatgtaggttcatttgtga

SEQ ID NO: 696 - DNA, 1627 bp; double-stranded, linear
ctatgattggcttggagagctttcgttaattgatttcttacgtgatgttggaaaaaactttacaattaactatatgatgagtaaagaaagtgtgaaacgtcgaatcgaaacaggaatttcttatactgaatttgcgtatcaattattacaagcgtatgatttcttgaaattgtacgaaacagaaggttgtttattgcaattaggcggcagtgatcaatggggaaacattacttcagggattgaattattacgccgagaacaagaagttcaaggatttggcttaactatgcctttaattacaaaagcagatggtaccaaatttggtaaaacagaaggaaacgcatttggctagatgcggaaaaaacttcgccatatgaattttatcaattctggattaacacagatgatcgtgatgtcgtgaaattcttgaaatactttactwtcttaacattggatgnaattgcaacaattgragaagaatttacagcgaacccaggtcaacgtgctgcgcaaaaagcgttaccaaagaagtgactactttagtccacggtgaagcagcctatcatcaagcggttaaaatttcagaagctttattcagcggggatatccaaagcttaacagcagaagaaattaaacaaggctttaaagatgtaccgacgtatgaggtgcaaccagaggatcaattaagtttagtcgacttattagttacctcaraaatagaccatccaaacgtcaagcccgtgaagatgttcaaaatggagcgatttacgtcaatggagaacgtagacaagatttagcagctgaattgacagaaactgataaaatcgaaggacaatttactgtgattcgtcgcggtaagaaaaaatatttcttgttaaaatactaraaaaatgaaagcttgggacgaaggtcgtttagacaacaggttccaagctttcgcttttaaaaaagataaattgggattaattctgttacaaaaaactcttttttactattgggcmtattcaattacagataacttgtgctatgctagaataaaaagtgcagtcgctataaggagtaggttatgaaatcaattgtcgaaaagttaaacttaacgaagtatcagcaactagttattttaaatagaccacagggagagtatctatctgaatttgcttcagccgcgcagcaattaccctcagaaccagttgagctgatttttgcatttgtgaaaacaatggcggaatttcaagagattgtttcaatggtgattgaaggtcaacatttagtagaaaatgggttgttatatgtggcttatccgaaaaaaggcaataaaatgtatccaacctttgtccaccgagatgaaatttttccaacattacaagtaaacgaggcagatgggtatattaaaggctcaaccttaaaatttaatcgcatggttagtttagatgagacttttacggttgtcggcatgaagaatgttcttaaaaagctagcgaagaatcagaccagttctgctgttggggatatgttcatatttaccggaaattgaagcgtgggacaacagaccactgctgcagcgacatcgtgcatacgcnggtatccaaagatggcccgnatgtttaggcaacgacgngcccgnaac

SEQ ID NO: 697 - DNA, 869 bp; double-stranded, linear
tcaaacgtttatcataaataaatgtaaattataatattcttttgatttaaatagatttatatatgtnatacgtttgacttttttctgatttgtttatactattagactaactactattttctaataaaggagacattacttatgtcaagcatcatgaaccaatggacggatgaattacgttatgcgccttattcttcttggacatctgctcacctcgaaaatctaacttctattatcgcgcaatctagttggcgttttaagtatcatattcaaccacagacaggactactaaatgatcccaacggtttttcgtatttcaataaccagtggcatttattttatcaagcgtttcctttcgggagtgttcacggactaaaaagttgggcccacttaacttcctccgacttaattcactgggattatgaaggaattgccctttatcccgactctgaatatgattctcatggcgtctattcaggctcagctttaacaatagataaccaactatgtttattttatacaggaaatgttcgtgatcaaacttggcaacgatttgcatatcaaaatattgcatggctgaattctttaggtgcgatcacaaaggartcaacaccattcctacctattgaccccaattattcttcccattttcgtgatccgatggtatttccttatcaagaaggacttgttttattaattggtgctagtgatttaaatggacaaggaaaaattgtggtctatttttctaaagatcgaaatgtacacaattttcatcaacttggcgaattgacgttcaccaaccaagaattaggctacatggttgaatgccccaatttggtatttattgatggccagcctgtcttattatt

SEQ ID NO: 698 - DNA, 774 bp; double-stranded, linear
tgtcagattgctcgtttatcgtttcaatgcagcattaaggagtaacgaaatgcgattcgctactcctcaaagactgatttctattctttttctgaaccttctgttgcatgatagttcacgctatttgaggtaccttttttagaaaagttttcaattagctctttcacgtcgaggcccgttgtttcttttagtgtttcttgtgtaccagccaacaaatttgttgcataatttgtaatacggttggcgccagaattttcgccacctgcgcctgtatctaccactgaaatcttgtcgatgttgcccaatggttgtgctgcttctttcattaattgtggcaacatttccatcaccatacttaacacagctgcttcaccatattctttgaaggcatcagcaatcttttgtttggcttcggcttccgctgcaccacgagctaaaatagcttcggcttgcgcttgacctgttaaacgcgttttgttggcttccgcttcggctaatgcttcaactttgaagcgttctgcttcggcttctgscacttcgcgtgccttttgagcaagagcttcttgttcgcgtgcgtaacgatctgcatcggcttttttcttcacttctgagtcgtattgtttttcacgacgcgtaatttctttttcttctaactcaatttgtttttgacgttcaacgactttgacttccatttcttgttccaccacgtgttgttgtgcacgcgcgctttccaagttataggcttggtctgctttggctttggcaatatcttgt

SEQ ID NO: 699 - DNA, 992 bp; double-stranded, linear
atctgtaaaaataatcagcntctcgttcttgtgcgtgttcaatttgtgtcaaaatttcatcattgatagcagacccaatcgtttcaatcgtatccgctgcaactacctcttgaatgcggcgtgtgtcgtcttttccttcaacgacaatgatttctgcaactttcattttttctttcatttatctatccgaaacaagcgatgagcgktgactctcgtttgttctgccacttcttcaaaggttagttgtcgtaattcagcaattttttccactacgtatcgtgtatagcctggttcattccgtttaccacgataaggaacaggggctaaatagggtgcatctgtttccaccaacattctttstagtggtaccgccatcgccgcttcttgaacatccaatgcctttttaaacgttacgactccactaaaagaatatacmaacctaaatctaaaaatttcttcatccactcggcatcaccactgaaactatgcatgattccaccaatatctgaaattttttcatcttttaaaattcgataggtatcttctaatgcctctctcgtatgcacactaaacggtaaattcatttcccgagcaatcgcaatttgacggcgaaagactttttcttgcacctctttaggatcctccatccagtaataatcaagrccgatttcacctaatgctacaatttttggcaacgttaattgttcttgtaatcgtcgttcaacctctggcgtatagctacccgyttctgttggatgccaaccaatgatactataaatattggcatattcctgactaagtaaaagagatttttcaatcgttggttcatcaaaaccgaccacggccatctctgtaacacccaattcttgggcatgtgcaatcgtttctggaatatcatcattaaattgttctgcattcaaatgtgtatgtgtatcaaaaatcattatgattgcctcctttatctcctctctactttatcatatttcttgaaa

SEQ ID NO: 700 - DNA, 748 bp; double-stranded, linear
gccagattatgaattgttaattaaaatccttaaaaacgattctaactatcaattactttcttttgaaacangaacattttcgttancttttgcaargttagtkgaycctaatactgtagctcattccaaacaatattttggtggagaagataaggacttaggagtttttgtagatatttttccaattgatggtatccctgatactcaaaaggagagaaatgaactaagaaagataacggaacagtatcggttaaacttaatggatactttaggtttaagctatgcacgaagttttcatcttagtaaggcattaataaaattaataactcgttatcctaatcattttaaagtgaaaaaagtaggaaacaatcaatattggcgtgatttatatcaaacagaggcaaaaaaaaccccatttggagcaacaaaacattgtggttatctagaatggattcatatagattggggtgtatttcctaatgaatggtttttggaatatgaggatgtagagtttgaaggacataaatttatggccattaaaaaccgaaaacaatttttaactttacgttatggagattatatggaaatgcctccagtagaagaaagaatcactcatcatcccwawgawwwwtaccaaaaatamagattatttataggttttttagaaagaaggcgtacttaaatgaagcagcaatatacagcaactgttgttatggctacctataatggagaaaaaaatatcttagaa

SEQ ID NO: 701 - DNA, 1002 bp; double-stranded, linear
tggtgccgactttcgtcatcgcancgcacgaccntttcgaaangatatgggttccatgacgttgtctttgngctggtaagtttgtgttaactcccattcgactctaggtattccaagttaatcaccatattcggtttgattgacgaagtaagaaccgtttctcgaattacctgattaaaaccagtgcgatcatatttttcgtaatctaaaaagccgttaattcagtccgtaggagtgtgtttacgctttttctaagtgcgaacggaataattcatttaaatcgcctttagtgactagagtttgcacaatttckgtagtaaaatcattcatagggaagtcctcttttctgtgaattggttgtcgttaactttattctacagaagcgacttccttttttgtatggattttttcatytacacaaaatattttacactctcaagttawcgtacgataactttaawwcatatgttgtacaagtttttttgttaattgtttttagttatattatcattaaattaagtgaactgagacagttttattggcttwaaaatctatattaaataaaacaacaaagaccttaagttggagtttaaggtctttgttgttttatttaagattcataatcacaatgccgacaataataaccacagcaccaataagggcattcgttgtgattgtctcttttagaataagatttgaagcaattaaaatagcgatgtttgtacaggcaacgcctaaaggaacaatgtaagaaacatcggaacgactwataattaacatccataaaataaaactaattaaataacaaaataaacctaataaagatataagtgagatattcattgaaaagattgtttgttggagttggatgttcmaactgctagaacctagtttaaataagaccmgaccagcmgaagacmgaaatacgtaawtaataaaargaaccmtaatttcccttctctcaaaaataatttccgtgcaaaaaaatgcaagacctccatt

SEQ ID NO: 702 - DNA, 855 bp; double-stranded, linear
cttgaataaacgaaatcaacttgtcattgagaaaatgcttgtaaggaaatctttgattagtgcataaaaaatgctcactcttatctgggagcaagactytcgttaatgactgtttaattctgataaaaataaaagaccgtagcttatagtaggctagggtcttaaatacgttattgagtaaaagaatttaatgtatactttattttcgtttcgttggtatcgatatcagtaatttgctctttagtaatataagcatgaatactttttgaaatcgtaatttgtacttcagaggtctttatttgtttaaatagcgttctttcaaatgtacctgagatatctccatgtgctaaagacctaatcttaaaatagttcttacttttatttgcagccaagacctctccttctatctctatttcttcagttaacacgtttcnttcatttatttgatcattcacactagacaacataacatctaaatttcttttgatcttttctgatttttttatattactcaacttaacttgattggaaattaaatcaattgataaatgcattttcttcaataactttatacagcttagcagtttcttcaatgagctttctttcattaaacagttcttcttcatcgtacattggtatataggctaaattatctacgaagncaacagaaaaagaggcctcatcagtaaataatcccgtttgncgatccttttctaattcgaaatcaagttttagcgaccctcttgaaggtgcggacatcaaaagtttcttctgagttcctaattctgcatgcctttgacttaaatcttgccatgtacttcttataaattctaaagcactataaacaatatcaat

SEQ ID NO: 703 - DNA, 565 bp; double-stranded, linear
acagaaacagttgatgtttcatcaatgattgatgaattagcaacaaaagcgaatgtcgctttaaaagcaatggaagattttacacaagaacaagtagatcacattgtccatcaaatggcgatggcggcgttakaccaacatatgcctttagcaaaaatggctgtcgaagaaactggccgtggaatctakgmmgataaagcaatcaaaaatatgtatgcatctgaatacattkggaataatattaaacatgataaaacagtgggtgtaattaacaaagacgaacaaaccggcttaatggaaattgctgagccagttggcgtggtatgtggggtcacaccaacaacgaacccaacgtcaacaactatttttaaaycctaattgccttaaaaacmagaaatccmattgttttgctttccatcctagcgcaccaaaaatgttcggcagaagcggcacgtattgtacgggatgcggcgattgcagcaggtgcaccagaaaattgtattcaatggattgaacaaccatcgattgatgcaacatctgctttgatgaatcatccagggattgn

SEQ ID NO: 704 - DNA, 673 bp; double-stranded, linear
acgtatgttcgctatagatnatatgtattattaataaaaggagaactacatatgattacaaaaamagaaaatggttactttgttgacgttagcttggggattgatccaatatcaggcaaacaacgtagaaagagacttacagtttcaactaaaaaagaagctcaacaaattgaatcaaagtatttaaggttataccacgaaaataaattaacaactaattcagacttaactttaaaagatatttacgaagtttacgaagaaaaatacacgcaaaaccttaagccatcttacaagcaaacacaagaaagaatttttaaaaactatatagaaccttattttaaaaatactcaaatcaaactaataaaaaaacaacaaatctatgatttccaacagtttctattaactagtaaacctaagagaaaagagactttatcaaataagacaatcaatatgattattattcatctacagaaattatttaacgtagctatgaaagaaggattatcctacgaaaatccttgtaaccaaatagacaagttaaaagtgcaaaaaaaagaaattgatttttggacattagacgaatttacaacctttatttctcatattgataaaaataaaccatttttaaaagtattctaccagtttgcgttttttacaggaatgcgtgcggaga

SEQ ID NO: 705 - DNA, 814 bp; double-stranded, linear
actgncgaattgcttatcagcaagtattagatgtcgtttcgcaaaatttgccagcaggatttgaattaacaatgcaatatggcatgccaacctttgttgtgccgctttcagtatttccagaaggctatcttaaccgtggtgatgaaccgttaccatttatcagcttaggcgctactaaaaggcaagtagctttatatcacatgggattaatgggaaatgaagccgtccgaagttggtttcaagaagcctatcaggaacaagtgtcaacaaagctaaacatggggaaaagttgtcttcgcttcactaatcctaagcgaataccctatgaactaattggcgaattagtaacaaaaatcacgctagaagaatggctgcaacagtatcaacactaccaaaagaaaaagaagaattattaggaggaaccacatgttattaggatcacacgttagtatgagtggcaagaaaatgctattaggctctgccgaggaagcggctagttatggctcaacaacctttatgatttatacaggtgcgccacaaaacacgcgtcggaaaccgattgaagaaatgaatattgaagctgggcaagcttttatgaaggaacacaatttaagtaatatcgtcgttcatgccccgtatattattaatttaggtaatacaattaaaacggaaaatttcggttttgccgtagactttttgcgtcaagaaattgagcgagcacaagcgttgggagcaacgcaaatcacgttacacccaggtgcgcatgttggtgcaggtccagaagccggcattaaacaaattgttaaaggtctaa

SEQ ID NO: 706 - DNA, 590 bp; double-stranded, linear
tataaatagcgaaaatttttgaccaataaaatctttttctctataaaaaaacacctttgtcgaactcgtataaaaataagtccaacaaagatgtcaatatatatatttaacctttcaaatattctctttactttaataatcaataaggttgtttattggcggatagcttaacccacttttgctacataccacttattagcagttaaatacccttgtttcgtctttaaccttggtataccattgtttgtatattcgattgcttcaacttcaacaatcgtattcttcttaacagcctgtccttttttagtaaactcagtattattgtagaaacaatcatcaattaagagcttaactttttttggattagtgataaagtaattgttattggtatttccagcagctgtcacatagtttttatttgcagtaagatatcctccttctgtcttcaagcgaggaacacctttagaggaatacycaatgcccttaaactggaacmacagtcccagatgataaggttctgctaccattacggaaactccaacatcngtataaaagtttatccnggacacccgccanaaaaatttgggngg

SEQ ID NO: 707 - DNA, 1283 bp; double-stranded, linear
ccctantgtaaaaatattatccctaaaaatagtcccaaacatccaaaaatcaaaggatatttatatttkgatatgaattctaccattgktttctcctataaaacttttgatttagtctttgtatttttttcatgataatccttaaaaattatttcggttaatattatttgctctgcaccaaataattcatttaaattagtatttacctttcttataaaggctgtttgtcgctctcccgtttgaaaagctttgcgtatttttccttgtatatagattttgattttctttttcttaattacagattttactgttggatcaacaataaaaggttcttcttttgcagcaattaatacaaagttttcaattgcttttttttggactgctatttttccactatcagtctttttttctatacaattatgtgctttaggataaaacaatacaataattagaataataaacaataatgttagcaaacatccactaatccaaaacaaaaactgtgccatactattaccaatgtacggatagtttgtaaatggaagtaggtaaaatggtaaactaacaacaccttgcattgttattaatgtgtgtgctaaaggaaaaaataaaaaaaataaaacaaggattaataataattttaatctttttcgcataatacacctctttgtctacgttgtgaatatattcaattatctagtcattccttgaaaattcacaattcaaataaaatatatactattaaaaatttctaaagattttgtcactttgactyctwtawcyttctctcctttcaactgtataacttatttaggtgaactgataaaataaattttatcagttactatttctaaaattcttaaagtaatcagacctcatttcagaaaaataatgaatgtttattttataaaataaaatatttgatgaaacaatattaacaagaaaaatctactaagtcaaacaaaatgaacgatcatatttttagggaagaaaaataatttaaattttacaatgaatgtatgagcaaatttgttgagctaatatttggatatttttataataagtttaggggtatcccaatatcactctctaggggtgactcagagcaggggaaggagttacccctaaaaagtatgttagaatgattttatcgcatcatatccttttttatgtaattagttgataaaatctatctgtacttatatttaacgacygaaatcggtcacttactgaaaaaacatctaaggtagaaatgaatctcacctaagatgttttttgattnt

SEQ ID NO: 708 - DNA, 3738 bp; double-stranded, linear
ggcccctgggtttccaatccaaccccanggacaatcccctaantttttttttaaacntcctcttttccggtaaactggggctaggcttccttgggtgggaattctttctctattcttctcatggaaactcactcccaattaatggaatttatctttttctagtaatcgtttcaattcactttcaaattcttcagctgaaaaaacatgcaatcgatcaaacacttcttkgtactcgtccccttctttgtcaataaaatattctttaaacatatcaagttcttctttaatgattgaactaggtgttacataaattaagcgtgcatcttcataattttttaaatgtttaatgtattttggaaacacaccctgactataacgtcgttttgtctttagtgttaattctatttcaaattgccactctacttctcgtccaatactatccaaaaacataaaaatgaagtcaggaacaaagtattttacgcctttttgatttttcttctcgtcttttacttcatatactttacggcgttctgatactaccgctttaaggtgcgggtggttattacaaagttccaacatttttatcagataatcattaatttgtaagtggtgttgtaaattgtattcaggaacttttggcaaggtgtagtacccaccaatgtaattatggccttcttttgttaggtaataaaattttgttaatccgatttgggaacattccactagatttttttccttcagtttttttagattaccgtatacactacttttttttgccatattatcaaattgacaaaagtcaataagttgttttaccgatacaactctcaattcatgtagtaaacacaaaagaatcaagtgtatcttatcttcttttgaataatcaataaagtaattgtaaagtaatggtttcaaagtatcaccgcatttctataaaatgtacaaataggcaaagcctatttgtttcattgaaaaagagtttcggaacaacgtgtagaaatactttttcagcttttaagtcctccaagttttggtggaggatttaggaggttgttgctttgggcgatagtcccttcaaggtttggtgaaggggcgtctatcgcaaggggtagttgttaatcttttgaactttatcttttgaacttttttctttaatttttattacttctatcaccttactcattctatttttttactctattctgtttgtcctcggcgcttggtatttttttcgtagtkgcaaaattcctgaccattttcgcttaatgggggttttaacccacgttgagcgaaaatggtcaggaattttgcaggcggagaaagccttttataccaagcgccgaggacacgccactacaatttataattccacacaatttccagtggttttcctaagtatttccatgatgtttccaaaatttgacacactatattaatctattttgaattacttttttgtaaccattcgagtgcgtttcgcacataaactttttgtggtgggaggtttacattttctgctgtacgataaataataaactcccctgtacgcaattcttttatcttgtttggactaattttgaagcgatctacattacgtttggttcctctatctcctgaccaatcagattttccaacatctgaataaccatcttcttgttccgtaactgaagttacatcaatgtcttgatacgttcccattgtttcactccaatactcggcttcacctttttcgttggtctttccaatgaacaaagtattcacatttccgacaagttgttccattaatttatcgcctaattttgcaatatctgccatcgtttgaggggtgaaaataccgtaaacacctgcacctctacctttatttaccatatcaataaacgtttcatttagataagaagcaggttcatcaaaaatcacaaggacttcacgtttaacattttttcgatacatttcagaagcaaaataatttacgtctccgactaacatttgcgctaaagtgcggatatattctttgtaaatcaatccattgaacgatacgtaaactaactttcgttgattgacaatttcttgcacatcgagaacattttttgcgtttttagtatcaaataattttcctaactcactgtctaataacatgttaatgtttgtctgtaatgcttctgatgtggcatacaaataaaacggtgaatctttatgttcataacgaataaataatcgttcgaacaatttttgtttgatattttctcctgtttctttgtctgttggcaaatatcttaggtttcgtttgagtaataaatagtacgagtctaaatctaatgtttctggattaaggacaatcgtttccgtttctttttgtgctattcctagttgggaaatgtttctaaatttactgttcttaatttgtgaatcttcctctttttcttctttatcaaggtctgaatcaggcagtatctcgcttccttctttcactgattttttcttaggtttttgtattttcttttctacttcaatctcaaatagtttgggattgtttggtaaaattgcatccgcaaataagtgtaaaacatttctcggaagtaaaaatcgttgaacaaatggtagacttcgttcaacggtttctgtcgtacgagtgtctccagataaagtaaccttggctcctttaaactcgtctaacaattgaattgttacttgcaaaagagctttncgctgcgcctgaataaaagacactttctgtttcggctaaagacactaacttatcccgaatagatatgtcatttccatgctctactgggttgtatctcatatcgccatcatccgtaaaagcatgcacttctttgtcataaaatttggcaatttctcgcatactttctaatgtatctcgagcgccttttccatcaatcaatatcaccggaaaattaaatttgactgcgtgttggacgagtaattgaagtaacgttgttttccctgaacctgtcgttgcgggaacaagaacatgctgattgaactctgaaaagttgatgatatatgacaacccgaactcactcataccaagtaataattggttggatagttctttatacttgtcaatatcaacactttctactgcttcttggtattctttttcttgttcatcagtaaagcgttgtgactcttcaaacttatttttttgcctatttttgtattctttagattccgtcactttcttccgttcgtcttcctttgaaataacttttcgttttgccacaaatgaagaaaatgccaaaaaaatggcccccattccacttgatccaataagcaaagcgactattgtctcccaattaaaacgaagtgctgtatgaagaagatttaaggggaaaagaagatacgcagacagataccctctgggaatccagaggataaatgcaaagacatttattacaaataacacagctgaaaaactaagaaagacaatactatttcgtttcaaaaaactctcataatccatatcaaatacatttgcagccttgtctcttttatcaaccgctagaccaattagtaatggaatactgcctaaaatcgcaaaaggatataaaagaactccgactaatccaaagactagtcggagttggtggtagcgagtcattttttgttgttcttgccctattggcggtttctttggttgtagcaacccattgttaaacaaattatttccttgcacgaggttgtctcactcctttaggtttgtttgttatcttctgt

SEQ ID NO: 709 - DNA, 555 bp; double-stranded, linear
gcgagcttttattcaaattgttttacccaatgtgtcttcaggaatttttgcagcctttatgttagcatttgtcaattcgtttaacaatgttcctgtatcgatgtttttatcaggtcccggtgtgacgatgctgcctacttctttattaagttatatggaatmcaattatgatccaactgtttcmgcaatttctgtattgtkgatgctactaacaatgggcttaatgtttttaattgaaaaaacgttgggactagcttccattgcctaaaacatggaagaagcacgagatagaaagaggagaaaattttgacttttgtggatttaaaagatattcgcgtcactatgacggaaaacaagatattttaaaagatttaaatatttcaaggaaaaaggagaattagtttctttattaggaccgagtggttgtggtaaaacgactacgctaagagtgattgctggattaattawgccaaacgacggacagtttytcgttgaccaagaagaactaacaaaggttcctgtccanaaaagaaacttcgggatggtttttcaaag

SEQ ID NO: 710 - DNA, 700 bp; double-stranded, linear
taaaccaaacttttttaattttatctaatcatactanaaacattcaatttggagtcactaatccnggttnctcttttggttcatcataatactcttttcaacccctctctatactcttctcgaatctcaaccattgattttggttcttgtacattgcctttctctataaatataacgtcatcaagaaatgtttccatatctctcaatatatgactactaattatcaacactctattttcggacaaggtcttaacattctcaataaataactctacaccatcaggatctaaaccgttaaatggctcatctaataatactaatgaagggttgtgagctgtagcaagacctagcaaaaacctttgtttcattcctaaagacatcgtattaaactttctttttttatttacatttagaccaacatccattaatagagtctctatcattaacaaattttttaacttgtaataaaaagcatggtcattgtatatatcttcaagcataaatccatttaaactatctgagttaacaaagttagtacccacctgcaataatattttagggtctgctatttctacttgccgattgtctattttaagtattccactatcaggtctaangcaaactacatagacatttccatcaaagttggtttttacctgcaccattcggacccaactaatcccataaaattttnccctac

SEQ ID NO: 711 - DNA, 1226 bp; double-stranded, linear
cgtanattgggtggngcggagctgtattccaaatgacattcacgtatttcaaactttttcaaagctaaatataacctaatcatacactcttgataacaatcttcatcaaaactcccatttctacaagattccttaattagtaacggttaaattkgtycacaatctgagcgaacgcttctycatcatccttttgaactaaaataacaagttctaccaatgatttcatttcgtatttcctccaaacacttatcactttttttcagtgaaagctctggtggatcacgattcttatatatttttttaactaacgtagtaaacgttctcgtattttctttagaatacgttgacgcttttttgttacaccttgtctacttaacgataattgaattgaaatttcataatccgaatatccaagaatatattttcgcattaaaaaggatttctcttccctatttaatttttcaaattcagtagctaaatctaaattgtcgaattcaaatgataaattatctgtttcaacyctgatcatttcytttacmaagraagtcttatcttcaattaagaaatcaagaaacttttgtccagaaataacctctgcttcttctattctggaattttttacaaagtaatttatcgcagtattatgaacggtttttttaatataatttataatttgagcatcatattttgtaacatcaaagttctgtttcatcgcagccacttcttcctttggaaattcgaaaggaaaaagatatacggacaagttagggtgtgtttctatactgccaatatcctctcattgcacgctccacagagattgaatcatctcgatttatttttggaagaatattattcacgaaatttctataatcgggaagaatatcattatttttagctaattcctgatatatttgtttacctgacaaaggttttcctgactcttttaaaatcgatgcaataataaacccataatctttgtaatttcgttgatgagtgccaatcatttttcgctgaattaaataatcctgaagcactttttcacttttgaaatttgnaaattnagtttcttgagatagttcatcactagaatccgaaacaatcttgtcttcttctaaatgaatcaagtactcttttaaatcataatactgtcttgaaagttccctcctttcctccattaacagtttcagctgttcatacacatgacatttttcatcaggaatatccag

SEQ ID NO: 712 - DNA, 503 bp; double-stranded, linear
agttgttcaattttctacagaaaatttttggtttcgctttgttagtggattagtggctgttggacttggtgcctatttcgtctatctatttgttgcttttttgaaaaagaaaaagctcataatttggacttttttaggaatcaaagaaaccttgccagtggtcttgttaggtttggtgataatcttttgtgtgggaatatttggtgatttcttattacgtctggaaggattagagacgacctctaaccaacaaagtgttgaagaaattgtccaatctattcctaaagggcttatacttatttttgcaggtgtgattgggccaattttcgaagagggaatttttcgtgtcgggattcaagcgtttttcaagccagcttcaaaaataggcatactcgtttcttcwawtttatttgcacttgngcacacgccgacagatataggkagttttgttattnatggggcangggnttagcttaagttgggncyawcwacgcacgggcgct

SEQ ID NO: 713 - DNA, 714 bp; double-stranded, linear
agtcaaagaattacaagcattggcggcagcaaaaaatctgcgcctgatggttggcttcaatcgtcgttttgccccttatacggaagtattgaaaaatattcctgaaaaacaaacaatttttattwaaaagraccgcatcmatacaacgagagaaacaagttttatgatgtatgatttatttttacatgtcgttgataccgcagtttatttagcggaaggaccgctccacgtggtgcagtcaaaattagtggaagaaaacggtcatttaaaacgagcaattttacaattagaaaccgaacagacaacgattgtttgttccatggatttacactctggggccaatacagaaacttttgaagtcaccagccccacaggtacttatcgcttggaaaatttaacgcatttgaccatccaaacagaagaagaataccaagtaaaagagatgggagattggacgccaacattggaaaaaagaggtttttaccaaatggttactgctttcattcaggccattcaaaaaccgcaagagcaagagttaaagcaagaaaaagtctatgaaagtcatgcgttatgtgaagaaatgctacgccaacaacaacggcatgttctttaaaggggactagcaactttctttctatcatgctagggaggtgcgacaagtccctgntatgngtcatgtttgtcatctggagccatagnacagggtncatcatg

SEQ ID NO: 714 - DNA, 1190 bp; double-stranded, linear
ttaacttttcccggtngccccaaanaccaggcytacaccaactaatactgatgcaacacccacacttaatttttttatgctatactttaatactctttttctccctttttttaaaatcatatgcttattgttttttccaaacaaactaaatttgctcccttccttatttaaatttaaaattacatttttattataaataatacaaaataggaattcttgtaaatatcacaaatatttgtaaaaaaatcaaaaaaataaaatattataaaaaaaaccgacctttacggggtcactggaacatccctagaaatcaagtaaaaaaaatccagaggattttctcctctggattsactattactctacattttttagttattttattattcaattattctcattaaaaatttttctttctatattacttaacacgagattccgttaattcttttgctttagaacttcctttagaagctagctcttttgctttctctgtttgctcactggcaaaattacttactgattctgttgcctcaccaaccttatcttgtaaactaacggaatcttcttcatgctgttcttctgtcttaatatcaacaacatttacatttacttcaataacttctaacccagtcatattttttacttcttttgtaataatttctttcatttcattgtaaattttataaatatcttttccatattctgcaacaatatctaaatctactgctacctgtttttctcctacttcaaccactacacctgatgtaacatcatcggtattcactaacttaccagctaaatttgagaaaaatccaccatcaaccgtaagcaatccttctactttttctaaagaaatgccaataattttttgaatcactttatcttcatacgttaattttccttgtacattttccttctttgtttcttcctttacacttacttttgttttctccatttgtatccactcctaaatattctttattttatttattttggaaaaattttccaaataaatcctcatttttaatataactccctataaatacaccaatcccaaccataactaataagagaattgttttaaaaaaaccaatagtgaaaaagaaaagtgctaataccaatcctattagtcctccaataattggatacttatattctaggaacaattctttcatattctcccctctttc

SEQ ID NO: 715 - DNA, 491 bp; double-stranded, linear
tttaaaacagatacaggatcgattctgattaaacgtgtgattggtttaccaggagaagctgtgcgttacgaaaacgatcaattatatgtcaataatcagccaatcgctgaaccgtatttaactaaaaacagaaaaaaagatcatgaaacgatgccttacactacgaattttgattcaaaagaattgttaatgcaagaaaaattacctaaagatagctattttgtgcttggtgataatcgccgtatgtccaaagacagccgttcttttggtgcaatacatgcagatcaaatcttagggaaagcacaatttgtttattacccactcactcatatgaagatcattcctaaataagtaagaccamtagttcgtttatttaaataacgactagtggtctttctaatctgaaaaattgtyctcttagctgnaaaatggtaagggtaaagtaatggtagatgtaggaggncatgccaatgattagaaaaacaattttn

SEQ ID NO: 716 - DNA, 434 bp; double-stranded, linear
tagtactagtaatcgttattattgctgcggtgctatacttaattggttattttatgcgcaaaaaaaatcaagaacaattagatgaattagaagttcgtaaagaagccctgtttgacttgccagtctttgaagaaatcgatgacattaaaaamatgcatctagttggacagagtcaaaatagtttccgtgaatggaatcaacgttgggtagaactatcgacgcgttctttcgccgaactagagagtcaaatttatgaagtcgaaaatcaaaatgaaattttccgtttcatgaaagcgaagaaagcggtcgtggaagcgaatgaaacgatgaccgaaatggaagccgaagtggaagtcatcgtaatggcttgaaagaattacgtgaaagtgaagagcgcaattcattagaagttcaaaaagcttnggaggncatga

SEQ ID NO: 717 - DNA, 1278 bp; double-stranded, linear
agtgcagagattgcattattttttatcgcgaaaaaagaaccacctggatgtgtggaactagaagcgaataaggaaggaggagaacaaggaatgcctacaattaaccaattagtacgtaaacctcgtaaatctaaagtagaaaaatctgattcaccagccttaaacaaaggatataacagttttaagaaaactcaaacaaacgttaactctccgcaaaaacgtggagtttgtacacgtgtgggtacgatgacacctaaaaaaccgaactcagctttacgtaaatatgcccgtgttcgtttgtcaaacttaatcgaagttacagcttatatcccaggtatcggtcacaacttacaagaacacagcgtggtattattacgtggtggacgtgtaaaagacttaccaggggtacgttaccatatcgttcgtggtgcgcttgatactgccggtgttaacgaccgtaaacaaagccgctctaaatacggtacaaaacgtcctaaagcttaattataataagacaataacaacttgaaaaatcatatttcggaaggaggagttacggatgcctcgtaaaggtcctgttgcaaaacgtgatgttttaccagatccaatttataactcaaaattagtaactcgcttaatcaaccgtgtaatggttgacggtaaacgcgggattgctgctaacattatctataatycatttgatatcatcaaagaatctacaggtaacgatccattggaagtttttgaacaagcaatgaaaaacgttatgcctgttcttgaagttaaagcacgtcgtgttgggggttctaactaccaagtaccagttgaagttcgtccagaacgtcgtacaactttaggtttacgttgggtagttaactacgcacgtctacgtggtgaacacacaatggaagaacgtctagcgaaagaaatcatggatgctgctaacaacactggcgcttctgttaaaaaacgcgaagacacacacaaaatggcagacgcaaaccgcgcatttgctcattatcgttggtaagatcctctctgtctgtcgcgtaaagtggcagcagaaagtcaatttacmatcgatttaaataaagagaggagtaaacatacaaaatggcaagagaattttcacttgaaaaaactcgtaacattggtatcatggcccacgttgatgctggtaaaacaacaacaactgagcgtatcttgtactacactggtaaaatccataaaatcggtgaacccatgaaggtgcttcacaaatggactggatggacaaga

SEQ ID NO: 718 - DNA, 1463 bp; double-stranded, linear
cgttnccaccaggaacaaccattaacngatgttacntcctggtggtacaatcgatactaatacaccaggtaattacgaaggtgtcattgaagtaacgtatccagatggtacaaaagatacagtaaaagttccagtagaagtaacagacaatcgctctgacgctgataaatatacacctaaaggtcaaaaagtaactactgaattaaataaagaaccagaagcatctgatggaattaaaaataaatcggatctaccaaaaggaactatgtatttttggaaagaaaaagtagatgtgggtatacctggaaataaaaaagctactgttgtagtaatatatccagatggatctaaagaagaggtagaggttgttatttctgtagtagataaaaaagcgccgaataaacctcaagttgatcctattacagatggtgacaaaattgttactggtaaaactgaaccmaatgcagatgtaacagtwacgttacctgatggaagtcaataccatggcmcagctgataagagtggttactttaaagttaacgttcctaaattagaggcagggacaaaagtaaaagtaacttcaactgatgaatctggcaatactagtgaacctactgatgtagttgtttcgtcaaatgaattaaacggtggaaaaggtaatggaacagacagtaagactaacaacaatcaagataaaaaacaattcttgaaaacttatcctaaaacaggagaggttgatagtaatatttatactattgctggtggtttaatattgttaggaactttagggttattagggtatgaaaaatggaaaaaagaggatgaatagaagtttaaattattaaatattctctgaaaagaggaagaagtctcttcctctttttgttttattgttgtttatttaaataatattgtggattttattattttttattaaaataatgttgatattaaaatgagtaaataattactagataatatttatttacttatagtaaaagttcatatttaagtaaaggagttttttttttgaatacggataaagaagttttattaaagtcattacatgtatgcttagggatacctatattagtatttaatgaagattacactcttgtagaagaatatagatctgataggactatatcattattttatgatttcccaacttttttaaaaaaagttgggaaagacaagcttaaatttgattatataactggtaattataatgagttgtttttattgtacgcatacaataaaaaactgtttttgtttggtccattcagatgtaataccatagaaaaagataaattctattctatgggataaagtccgtataattgtgtaaaagtaaaarggccatataacagtccttttacggtacaatgtttttaacgacaaaaacatacccaggaggactttacmtgacccaagtacatttttacacgggaaagcgangagga

SEQ ID NO: 719 - DNA, 1064 bp; double-stranded, linear
ctagagtattgaacccgcaagataagcaggtgggttcctcgatcgcagtattgaactaccaaaagaaaaggcatgttaccaactttgatacaagcaggatccctagatatcaataaaaatgttcggtcaacacagtgaaaggacaacgcgtacatcacagatttaccatctttataatagcatactctctcaraatcggcaacgagattgtttctttttttgaaagcgtattattttgttattttttctgtttccattcttggatacgcttgagttgctgatgtaaggcttgttcatatttaccaatatcaatcggttcgtaataacgtgcctcttttaatttgtcaggtaagtattgctgattgacccaaccgttttcaaaattatgtgggtattgataaccaatgccacggtttaattctttggctccagcatagtgggcatcacgtaaatgatcaggaacatctcccacagagccttgtcgaatatctgccaaagcagcatcaatcgctgtgactgcagaatttgattttggcgataaacakaaatcatgacgacactagctagaggaatcctagcttctggaaaccctagcttttcggcggcttgaacagcggtgaccgtccgagcggcggccgcaggattcccaagaccgatatcctcgtaagcaatgaccattaaacgacgacaaataatcggtaaatcacctgcttcaactaagcgacccaaataatgaagtgcagcatctacatcgcttcctcgaatcgacttttggaaagcggaaatcacgtcataatgggcatcgccatctttatcatgcgttaaggcttttcgttgcacgcactcttcaataatcggtaaggtgatcttaatttcgccttgttcatttttgggtgttgatttaacagctaattctagtccatttarcgcactacgtaagtcaccgttcgttgcgcgkgtcaaatgtgtaatgctttttcttctaagtggacaggataatcgcctaagccacgtgtgctaaacggntaangctcttgnatcgcttgctgaatgctgttccgaaa

SEQ ID NO: 720 - DNA, 684 bp; double-stranded, linear
gctattanaattatattttaattcnaaaatgnataaaaaagttaattcagaaatatrcattgaagcaaaataaaataattatttctgagactgctacatctatagttttaaaagaaaataacaatattaataaacacgcatatataaaaaaatacattgagtgtttagttgaattgtataaagatgacaactataaaaatatttcaaataaaataagattttatcatgattcaataaataaattgtatgaagataattttgaatattggatgtcacatgagcaatcagaattagagaaaattaagaacacaccaccagaaaaattagaaggtgaagattatgattatgtggctgcagagaagaatattgagcattatcaaagaaaaataaaagatatagaagttagtttaacaaactatcataaagctattgatttctttacaacagttatatccttatatttaaaaatagartgggataaagccaaagaaggccagtaacagtattgtaaattactcaatttaattaggcatttataggatagttgaaagcagttaagctaatatatggtactgtaagttaaattaaagtttgctgagatacttttttttcgatttgtcatacgctatacttaaattcataacgttgattttaataaccaaatttatgaacggagatgtcgtt

SEQ ID NO: 721 - DNA, 1120 bp; double-stranded, linear
tgtctattctactcccattatagaacagcaaatcaagctaaacaatatataaacactaacccattgcttaactttatttcctgaaacaacctattaaattgttactaccgcttctaataatagctttacttgttgtatatcttcactatttttttcactaggtgtctcaatcataagatctagtttaccaatcgcttcttcaatattatccgaaccaatacaaacttttcgttcaaaatcttcatgtattttacacgcataagaccttacaagttgttctaaaaatccttcaaataactttactactgcttcttcattttcaaaaaatatattatccaataataaaaattgaactaaatattcactcgtttcttcatataaattcaaatacaattgatgataatatggaaaactgcaccaacaacgataggcactaaatttaccatttaaaaaacgtctatacttttgtcgttttaattctaattcttctgataacattcttcttttaatacacctccttcgtttgaaatttccttcaaattaccacttcctttatgaagaaaaacaatactgctcttcaatcttctctcaactagccaatttaatggattcaatctacgactttccaataattctttttcttttctaactggacgtttctcttgtttcattccaatcactcccatttttttattaactttacccactctttttgaactcactcaaaatactttgaactaaatcactactaataaaaccagcaaaatatagttgcattaagtatctccgagcatagtcatacctgctcattgggaaaaatgggttcgtttcaaaagtaacaaataattcccttaatgaatcaatcgcttcatttgataagttgaatttttttggattcttaattaattcctctaatcgattcatcktttaactaaccacctcattttttattattaatgtctattaacaaaccttgttgacacaaattaataataaaaagggcactcgttagaatgccctttacagctgttaaacggcgctaccgttcgtccgaatacaatatttatttacttctattgtttattttcttgtttttcctttggttgaggtgcctgtgttt

SEQ ID NO: 722 - DNA, 539 bp; double-stranded, linear
aangancctctacatacagtaggcccatctaacatgtctggtncttttcctaacatcttagctagtagccttaggtntctttcacacttctctttccctaagtatttctttgtaaccgtcatggaaaaaagtaatctcgctttcaacgttaaaaattggatctaatcctttgttgttcctcaactcttcatgtattagaccataatacttaattttattattgtttctaaataatcgactttggccatgtgtgataacattatctaattgatatattgcacaactaactcttaatgaatctttaaatttaaacctgtctaacatatctattaagagccttaatttggtaagctcatctgaagatacatattcatctgcatcaataattaatatccattctttacttgctttttgtattgaataatttctcgcatctgaaaaatcatcttgccaagtataatcaaatatttttactttttcgctgcnatttcttttactattttttttgtcaaatcaatggatcctgtatcaataaatag

SEQ ID NO: 723 - DNA, 633 bp; double-stranded, linear
cagttgaaacaattgctactgccaatttatggctacgaacagcagatcggattaaaatcgtcgttggcgaatttaacgcctatagttttgatgaattatttgaaaaagttaaagcacttccttgggaagattatttgcctttagatgcagaatttccagttgcaggtaaatcaattaagtcaaaattgtatagtgttcctgattgccaagccatcaccaaaaaagccattgttaaccgtttaagagaagtttaccatcgtccagcgacggtgcctttaaccgaaacaggagctttgtttaaattagaagtggctcttctaaaagataaagtgacgttgacgttggacacgactggaccaagtttatttaaacgaggctatcgcattgaaaaggggggcgcacctcttaaggaaaacatggcagctgctttagtgawgttgaccaattggcgcaaagatcgtcctttttatgatccagtttgtggttctggaacaatttgtattgaagcagcattaattgggccataacattgcccctggctttaatcgtagtttcacttgtgaaacatgggattgggttgatccagcaatttttgaaaaagtacgtaacgaagccgaggcaaaggcagactac

SEQ ID NO: 724 - DNA, 672 bp; double-stranded, linear
atagttttactcagaaaataaaaagaaataaggtatgaaatgattgttgttatagttggatataattttgagaaaccgtctgaagattttaaaaatgcactgcctattacttcactgactatkgctawtamcaaatataaatatggcatagaaattgctcctttattaagtgatatttatattttacmytttaggtggctaattcaataataaatagacttgtatttttctagtgatttgcgaggtattgatttttgtgatttcaaaaattttaggtaggttctgaaacgagttgaaaacgagtttcttcttgtcttgataatataggtaattattcaataatataggtaattattcacggcgagttatatctacgctaaaccgttgatattattggtttaaaacacaaaaaaagttgcttttttcagcatactattttatgattaaggtgtcgaatcaaaatcaaaaatagagaggagaaaaagcaactgttttttgctataaaaaactcttaagttgtttggttctgttgcaaagttttaaatctactatcaaataaggtagaataatagaaaaagatagcaggaggaatgacgatgaatcattttaaaggaaagcaatttcagcaggatgtgattattgtagccgtgggctactatctcgttatacctt

SEQ ID NO: 725 - DNA, 599 bp; double-stranded, linear
ggtaaaccaggatgtcctgagttcgctttttgtacggcttcaatacttaatgtccggattgtattaacgcccaattgatctgtcttgtcaaacaaaaaaatcatctcctaatttaggttttttttacctttattcatagtgtagcttatttcgacaatgaaagcaattactttctgttgtgaagtcctttttcacgctgaattttttttagtttttcaggagtcacatcggtcccttcttgatccacgaccttcattccttcgatatggtgacgcatccctccacgaaatgcttctaaatactctttacgtaattcttgttgttcgactttttctttcgcactaagttctccacttttgcttattcgctaattcatttatacgggcaattttttctttcgataacatcaaaatccctccttactctcactgtctawattataagaactgccttaaaaaaacaactatattctgatatttataaaacacgaacgcttgtttgattcgtcgcatttatggtacactanttttnttanggaaagaggtgcgggtttggcgaacgacagaacaagcaatagaagactaaatatatatacgaca

SEQ ID NO: 726 - DNA, 694 bp; double-stranded, linear
tttatatcctcaggcacgatctagatgtagctcttagtaaatcttttttaaagaaaaattgtcgcttttctatttcaaattttgagtatctatttttatcacaccattctgaaaaattaagatatccaaaagcgccgtattgttctcctaaaatnaaagcaacccatgttttcaacgcaacctcaattttctctattgcatgtaacaaatgaattcttaaatttttatcttgatagtatcttttcaaaacatcggaaaaatatattcctttgtaatcatatacagtattttcattaacaattttcttattagctaaaggcgcagcaaactgcttaattcgataatatcctataacttttaatttttctacatcttttgaggtcatctgcatacctctttcttcaaaaagtgccatttgttcatcaaacgataatgatagtggttccttcatatttttcctccaaaataaaaaaacccccatgtcagtacgtgactgtcctaaaaagggatggggggattgtcttcttttttaaagaataatatacttttaaaatattgtcaatagcttttacttatttgaatggaccatacaggactcgaacctgtgaccgaacggttatgagccgtttgctctaaccagctgagctaatggtacaagtaagaaccaccttattgaggataaaatagttcttac

SEQ ID NO: 727 - DNA, 928 bp; double-stranded, linear
tatccaaggagtgataggacattaatcgatccataattttatctggtgctggcccccggtcatagatatccccaataacatgtaggtgatcgataatcagacgttggattagataagctaattctgttacgaaacgtttggcttcacctagtaaaataattttttcaataatttgttgatagtaaccgtttttggttgttgtttcatcatattgataaatcaattcttcgagaatatacccataggtttcaggaagggctttgcgaactttagaacgtgtgtacttcatcgaagaagaacggacgatttcaaccagacggcgaatcgttaatagccaccattcatnagagagggcgctttcattttctaaaagtgttaatttttcttctggatagtagataataaaacmaagctcgtccatctgatgggcatttaatyctkgtttaaataaaaatkgaactttttctcggattcgcccagaaccatttcttaaaatatggtcaaaagcttcaaattcaccatgtaaatcactgacaaaatgttctgttcctttcggtaaattcaaaattgcttccaaattaataatttcttcaatttgttgatcgcggttcagtgtagccaagtcatctgccttctttctttttcgtatataccaattttaatttaaaagattaaagtcttgataataaaggttttttattcgtatgccaattattgtaggctaattggcgaaaaaaagcnaccggagaaagtcagaggaaaatgggggaaattatanggagcnaccggggtttaagccaagaattttaattaaaccaaatggaagggccgggaaaccatgtaattgggacagccaaaatggatccgggaaatccattaggaaatcggnggttgggacaccgtaaagttggcgccaaaaatccgggac

SEQ ID NO: 728 - DNA, 420 bp; double-stranded, linear
gcctggagcagagcatgcgagaacttnataataaaaacccagaaaaatataaggaaacagtagctgcttttctagataaatatataaaataacaaatttattctttactaatagtagcaacaacaaaagacttgttcttaagttaacgacttagtgaacaagtcttttgttgtcagttgattttttttaataagttggaatttacccatgcaatctagggcataatctgataggatagtactagaaatgagggaaggataatggaagaacaattagtcgattatttacactatttaccaatagagcggggcttatcaataacacacggcggarttacgaacgagatttwaaaaaatacgtrgccctttttaccaggaccaaggcngcattcttgggccgaattggaccgttaccnggntt

SEQ ID NO: 729 - DNA, 359 bp; double-stranded, linear
gatgggaggcaaaaaaatgaacattgtcctgaacaatccattggaaacagaagcaattgctaaaatcattggacaaaaggcacaagctggtgatgtaattgtcctgactggtgatttaggggccggtaagacgacaatgacgaaagggattgctttaggattaggcatttcccaaatgattaaaagtcccacctatacgattatacgcgaatatccacaaggacgacttccgttataccatatggatgtctaccgtgttgaagagggtgcggatgaattagggttagatgagtattttgaaggagatgggctatccgttgtagaatggggcagcttggattgaagaagaattgccagaa

SEQ ID NO: 730 - DNA, 830 bp; double-stranded, linear
tccacttattttttcattttccattgacagaatagttgtaattgtccagawaattgtatataataaagaaagttattttcatattattttttttcaattaaaggagaatcctatgagtgaaacacaacaaacaaccttaaaaaaacaattaagtcgcgccacattacgatgttagccttagggggagcgattggcgcaggtctttttaaaggaagtggcgaagcaattggtattgctggtccttctgttttaatcgcctttctaattggcggtgctgttctcttcatcgtcatgagtggtttaggaaaacttgttttagatggcggaracacacatcatggtttgtctggcttggttcgaccatttttaggtgcacattctgctgattttattgattgggtttattattccatgtggacaattaatattatcgcagaagcggttgccgcagcttcctttttacaactttggtttcctaatattcctgcttggttttttgtttttattttarctattttaacgacgctcattwatctttactcgttcgtttatttgcagaaacaraatattggttggcgtttgctaaaattagtgtcatcattttgttaattatttttggtgtttatctggtgggacaacaaatgctaggcagtggtgtcttccctactttacaaagtatcaccgatcaggtggcttcgccccacaggcatgaaaggtatagttaattcttattagtagttatttatcctaggcggttcagaataatcgcgattactgtcagtgaagcagatgatcctaaaaaagccatcctaaagcgatcgtggtgtgat

SEQ ID NO: 731 - DNA, 861 bp; double-stranded, linear
tattaaaaaaaatagttgnaagagtactttsaaatttgtaaasastagaaatgatttttaayattagtaagsttaaaatagtcattactatagttgaataaactaatcttgaataatactttctgttatattttattggattaatatcaaattttctacttagaaatctataagctatgatggttgtaaacatcgtacatataattgtagcaatcgataatccataccctttaaatagatatatacatggaatttgaataataagttttaataaaagagttattgaagtgatttgcatagctttcttatgaaaacttagtgcttgtaaaatagataatactattgtaaaaatccctaatagagatgtgctaataattgttgctgataaatatctacttccatctaaattaaatccaaagaataatgtattaagaggattgcataatattatcattcctatcgaagtaggtagtaaaaatgtaaaggctaatcgtagtatttgtgaggtaccttgtaataactcaggttttgattttacagtacttattaaaggtagagctgaaatagtaattgatccaataatacctagtagtactggagctaatttattaggatttgcagaggctaatgtatacaatgtttgaagttcgcttaaactactttgaggaaaaaacaaagaatacaaaacctttaaagaaaattgatcaattaattgtaaaatagaaatagccgatcctacatatacaaacggcaatgattccttgattatatctatagcaagacctttcatgtgagatatagattttaaaggtaagaagtaaaaatctttaagttgaaacaaatttcttttttttccgataa

SEQ ID NO: 732 - DNA, 662 bp; double-stranded, linear
tacgacctactaacaagcggacgtcaatcgtaattttttccaacggtcgctgttgtagctcggctttaacttcttgagaaacttgccactctaatggcgacatttctaataaatccaaccgtctttcctcgggaatgtcaaagcaataagttattcgttcatctacttccacagctaattcctcggcaaaacgttggactacttttgattggaataactttgtttcttttcgtcattgggataaaaagccgctcgtaattcctttaagtaattctcttcaggaataattttaatcacagtcccgtcagcttttagtactcgccgaaattcttgataatgtgaaggggaaaaaatatttaaaatcgtatcaagcccttcattcgcaaatggcaaattcgttaaatccgccacacaccaaaacgcatcaattggctgattacttgctaaatagattccttcctttgataaatcaaacccgattttcagtccagataagcctgcttgacttaactcagcaagaaaactcccttcaccacaaccaacatcgactactgttttattttgaggaagatagtgcataattttgtttaaracaggcgcgtacatgccactttgaatcatttttcctcgagaagtaaacattttntnatnatatnctgtct

SEQ ID NO: 733 - DNA, 1067 bp; double-stranded, linear
agaatcgatatctgtaattttcattcttagcagtacctcagggtcaacctcatatcctgtaaaatcttgcttcatagaagccactagactagctcctagataaagtaattcgaaagcattaaattcatctgatgtagacggtcttttataattatattgttgaaaaagagagccaatataaactgttctcgctgaaccatacatcattaattccttaatcatcttatttaaaacagctggcttcaaattttcaattttttcagtatccgctatcatatccatccaacgagagaaaaggtcttctatttttttacctgaaattgaacgataatagttatcaacttgcaattccctagttgtttgatgttccttgtcttgcattatattactattttcatttcttatctcttctagttttttttcatgtagcctttgtggcaattcagataagccattttcgatagccttttttatccctttatagccaggataaataaaaattaaaataagtaactcaaaccaattattttttaacaattcaaacattttttcctctccttataattaatggtaaatttcctgtaacattaattataaaaaataaacgaaaaataagctagtttgtattatctcttatttttaatatattgatttccattccaatttaccaatgatttattggatgttttaatattaattacattttttaaattatctgcaacttctctatcaatagttggatataaatgtgggtacgtttcctaatgttatttgtatatcagagtgtccaagccttttttgaactgctaaaggattagcattcaactcattaatcaataaacttgcatggctatgtcttaatccttttgatagtgactattaataaaattcatcaattaaaaggaagcgatttcaacatgtcaaaagaaacttttcttaagtatggttttgttgtcctcttcataggaatttttttacttcgtgcccaaaaatttatttctgagcccctttcgtaccttttttcgggtattcttttgcttgttgttgcgtatttaatactcgtgaaa

SEQ ID NO: 734 - DNA, 446 bp; double-stranded, linear
acttaaaggagggaaaatatgttcgcagaaagattgaaattattaagaaaatcaaagccaaatttgactcaacaagatatggcaaatatkttaggcgttgccaaaaccacatacgcatcgtatgagcagggaaaacgaactcctgacgcagaattacaaaataaaattgctgattacttkgakgtatcgttagactacctacatggaagagacgttattaataactcaaatctagataaaaatatgaatagaaacaacgagctttctcctgaacaattaacagtagccgcacatatagatgatgatgtttctgaagaagaaatgaaggaaatactatctttcattgattatataaagaaacgcgatcactataagtaggtgtatttgatgrataaattgggaaagcytgatggcyaawtatcckgaactaaactaccngattagga

SEQ ID NO: 735 - DNA, 624 bp; double-stranded, linear
aattcttcagcgtatacatcatcaactgtttgtgttgggtcgataacaatgtataagtttttagttttttcgctgacttttgtagattgatagatgttatccaagccctcatctgttttatctttgtaagggaaataaactaaatctggtgtgccatttttgtaaagaatttccatacgttcgatatcttcatattttaaagcacgagagaacatccctaattctaagccacctaagttaatatcgtgggtttgaacatgatctccttcttggaaaatttcaattttgaacccttcacatggatgaatttcaacaaattcactaccatggatacggccaaaacttgttgtaatatgtttgatccataaatcaccaataraacgacgatcaatcgtccaagtttcaccatttctgaaataraatttaagtcctgtcakttctctagccatagcacaartctccytacttaaaaataatttcttacattattagtttaccatacttttgataaacggtcacaaactttcgctgtagattcntaaatcttttgtnatactttttaaaaaaggaatccaatcncaactacctgcacgttggtggagaccctttggcaattngccgtcc

SEQ ID NO: 736 - DNA, 800 bp; double-stranded, linear
gtcttgaaaaaagaggagttattaagctttataaagctgtaggtaacagtgttgaaaagtggtcagaagtaggaaatcttgatttttgtagtagtggttcagaatacatgatagagtgccctaatcttttatttgtaaatgatacaccaattctgatttattgtcctcagggtcttgataaatcagaacttagttatgataatatttatccgaatacttataaaatttgtcaaagttttgatgaaagaactgcgaaacttgtgggttcttctaaaattaaaaatcttgattatgggtttgatgtttatgcaacacaaggatttaattctcctgatggacgtactttaattgttagttggattgggcttcctgatgttgaatatccaacagataagtatgattatcaaggcgcaatgagtcttgttaaggagctttctatcaataatggaaaactttatcaataccctgtagatgctattaaaacactgcgaactagttgtgaagattttacgtcaaaaatagaaacaagtaatacttatgaactggaagtgacttttccggctaatcagaaatcagaattacttctttttgctgatgataaagggaatggactcagcttaatagttgrtactaaagaaggaaaagttattttagatcggagtaaagcaggaattcaatatgcattgatttggtawgactcgtgatgcttaatagatcnggagaaccaatgctaatatnttggagaaatccatcatgagatttataataagggagaagtattacngcggnattccgagagg

SEQ ID NO: 737 - DNA, 500 bp; double-stranded, linear
tgttgtgacaacttctatatcttatcattatctcagttgtttgtcaacaactttttaaaacttttttgttattttataacaagtttttttgatcaaacgattgatttaaaagcaatctctttaacgactttgttattctaacatgttatttatcttttcgtcaagaaaaatttttaactttttaaaacttttttcttaacgaactgtttgtcagaacagatattaatataccaaggatttttctaaaacgcaactattattttgcagaaaaataacatttttttcaatttcgaacgatgaatattttctgcaaagaaaacattcgtttcttatcttataatcccttttctcttacttaaatgttcgttaatcattcgtaaaaaaagcaacgtactttattgtacgttgctctcttcttttattccagcgattgggaataaaaattccaaagatcgttcctggatgcaatacgctttctgcatcaatacgtccttatagtt

SEQ ID NO: 738 - DNA, 562 bp; double-stranded, linear
agtagaatccgtcttgattttatgcatcactcgtcgcaaacatttgtctatttcttcttgataatcttcaccaattagaacgagattgtattctttttctactttagttttagcacgaataattgttcctacttgctcatgagcttcttgaatagtattagagaaggcmgcaataaattttaagctatctttgtttaggaaagtgttctcttgaacttctgaaaactgatcgagcaataattgttgttgcaatcgttctttttcagtatctattgtatctattgtatctgtatttagattattaaatactgtactgattttcataccctctgatttatcaacgttttggcagggtatgattttcataccctcttgattaccaagggattcagcgtttgtttttctttggggggtgggtatgattttcatacgctctgatttatcaacgttttcttgcatagtatcatcgaatgtttgcaattgataaatatcgttttctgttacttcaagttccgctagataaagtctattaggattgttcttacctagtgttttattaaaa

SEQ ID NO: 739 - DNA, 437 bp; double-stranded, linear
gcattattttttcgttttaaaatagtataaataatccttgtaatcaaaagaaggctacctaagaaaagaaacgcgttttcttttgtttctcctgtttttggcaattccttattacgaatcgcctgtttttcaatggttattgaagtagtttctgtggttgaattcgtggtagtatctgttgtcccactcgttggtggtgtggtactttctataggtttttctggcgtatagtgattagtaaatacttgacctccatcatactgagtagttgctacaagatttcctaaaagcgcctcgacggttacttgaacttgaaggttgtgcgtatcgtaggaaacacctgtctgttgcgtgkttactkcccgaatggtgtattgatagtttccaggagttcaaaggttaatggtgaaaattgaattttccctaaagtatcgtta

SEQ ID NO: 740 - DNA, 503 bp; double-stranded, linear
tcatttaagaaaaatgagcgtgggacaaaaatcactttggatttttgctccaccctcaaaaactgataaacggcgggaacagaaccaactccttcggaaataagccgaaattctccaaaaattaaagagcaattttcggaaatttcttcttatttctcggagctaaacggttctgtcccgacctcattatttcttattttgctgattcttaatggtataagtcgaaacgacctttagccatcatttctttggtaccacctgtttcaaagagcgctttgttcatgataatttttttcatgaatgaagctgggtatcctttaatgtctgttttaccaacgattcctaaagcacgtgtatttccgacagaacaaacagaaccttgtgatttaaagctgaaaggtttagttgcttcccctttcaattgtgcttgaatatttttagcagcatgagcgcccatcttcaaggcgatttgtgctgttgttgggtaggtcgawtgggttcng

SEQ ID NO: 741 - DNA, 673 bp; double-stranded, linear
tattgacaattaaaaatagcggtggtatactttttttaagttatcaaaagtatactaaggaggagttgtcaatgggaaaagtatatgttattggaaattttaaaggtggggttggtaaaactaaaacagtaaccatgcttgcatatgaaagtgcactacaattaggacgaaaaacgttagtaattgatctagaccctcaaggaaacgctactagagtattagctaagacgggagatttagccgaaatcacttatactgttactgaagcttttcaagaaggtagtcttgaaccagcaatcaccaatatctcagaaaaccttgatctcattccagctaacactgcttttagaaatctcaccaaaattttaatgacaaaatttccgtctaacgaatttgaccaaataaattacttaaatacattattaaaaccccttaaagagaaatatgacgcaatttatattgacgktccaccaactatttcagattttartgrtaatgcmatgcytgcmgcagattactgtawtawtgktcytcaaacmcmagagtatctttagacggtgctcaaacatatatcgcctatatgcaatacttagctgacacatacgataatggatttacanggccctagggaanaattccctggtatgttgcggncccgggggtangggaagcc

SEQ ID NO: 742 - DNA, 1476 bp; double-stranded, linear
ttggtaggctggtaaagttngnggtttaaactcmccattacgatctctaggtatttcccaakgttaattccmccatattcggttttgattgatcgaaagtaagaaccgtttctcgaattacctgaattaaaaccagtgcgatcatatttttcgtaatctaaaaaagccgttaattcagtccgtaggagtgtgtttatcgctttttctaagtgcgaacggaataattcatttaaatcgcctttagtgactagagtttgcacaatttctgtagtaaaatcattcatagggaagtcctcttttctgtgaattggttgtcgttaactttattctacagaagcgacttccttttttgtatggattttttcatttacacaaaatattttacactctccaaaagaaataccatttaaaatatttttttcaaaaacagatatagtatagtaaacattattaaccctataaataaactcttcttttccaacatttccttttttattattaaaatcatttttttcttcataagttaaaacttcagataatttttgaaaatatacatttaatagtagaaagtcattataagaggaaaccaaacttagaattggcttcataaccattgttactatagaaacaaaaccaattagtgatcctaatgacaaagaattgttgattattaatttaatacctattattaaaaatagagctggcattacactttgtatgatttctggtaatattccaaaaatagctatatatctatttttattttttgtaattaatagttgagacgtaaacatgtttttccaatttaacaaaaaactcttttctgcattagcagatttaatggtttcaatkccttcaattgcttctgtaataattctctggacgtttccttgttccattatttctttatctacaaatctttttattgtatgcgaatttataatacttaaaaaagctattaaagagattagaacaagagctattattgtcagtaaaatagaatagttaaccattaaaaacaaatatatccctaaaaaaagactatctattaaagttgttattaccttttgagacaatatttgagtcaagtccagactcctgtgtaaaatgctatacaatgtttttaccatttctacttatcaaaattgatgtattttcttgaagaataaatccattcatcatgtaggtccataagaacggctccaattaagcgattggctgatgtttgattggggaagatgcgaataatcttttctcttctgcgtacttcttgaktcagtcgttcaattagattggtactctttagtcgattgtgggaatttccttgtacggtatattgaaaggcgtcttcgaatccatcatccaatgatgcgcaagcktttgaatattttggttgatcgatataatcatgaatcaatcgatttttagcctcacgcgctaagttaatatctgtgaacttaaaaattcctttaacag

SEQ ID NO: 743 - DNA, 1081 bp; double-stranded, linear
cctgaactggaattgttgaagtaatatctcatgctggtaaagtaacgtttattgaacaaaaaattaaagaaaaattttaatatagtctgactagacatactagaagacatctgaccaattgtgtttttacacattggttaggtgtctttttgtatttttattagaaggagcgattcgccgatgttagaccaacacggaagaaagattttgattcaggaatataagtctgatttaaaagacgcaagtcgtcagcatcgacgaattgcaaagaagaagtatcaaattgaaaaaaatggcagattagaaacaattgatgaccgcactgcagaagatataaaggaacagtccatttatgctgaaattatttcatctaccaaatatgcgttatattggcttgaacatggaattgagcgacctcttgatgaggaggcagcaaaaaaaatacctaaatatcgcagagataaacatattacaaatatggataagatatcatacgaaatttattgtaaccagtatgaatctgcacgtaattaccctattactgaagagaaacaagagatgttgattcaacttaaagagttgttatcaacgttcagcgagagagaacgtgatttgtttgattatatccataatcagcaacttacttatgcagaagctgctgaaaaaatggatattaaagtagggactgctaaatccatgtcacaacgaattaggaataaaattgatgcttatttcgaatatggacatcagatttcattattttaaatttcatttttttgtaaaccattcccacctataggtgagaggtaaaattctcctattctaagttggtagagtagcttaataatatttacttgtaaaaraatacaagagaggaggtgttcctcctcctctaaatttctacaaattacgagtaaattaggtagacgtgtagctcaataggtagagcaattgatttttaatcaatggtgcgtgattgcttgtgccaggttcgactcctgtcacgtcaataagtgggaaaccacttaaataaaaaatcggtatatgtcaataaatgtttctactactgtgacacacgatt

SEQ ID NO: 744 - DNA, 486 bp; double-stranded, linear
ttcgaggagaaagtatgattaacgcagggttgtcctggataaaacacagatgtatcaatcccaggatttaacgctaaaatttgttctaatgtcattccgttacgttcggcaacttgacgtgccccttcgccactttgaacggtatcataaacaggttgttggttctgcgcttgttgctgttgttgattttgagcttcttgttgttgttgctgctcttgttgttgctgttgctgttgttgtgcttgttggtcctgttgttgctgtgcagcagcatctgaacttgaaggtgttgtattttcagctggttggctgcttgctggttctgagctttccactgattttgacgtactttcttttttcttctcttttgatgatgattggactaatgaagaagatggctggctattttgctagcactttcgttcggttcctggcctgcatcatccataagaaagtcccaattggaangcnataattaataatagc

SEQ ID NO: 745 - DNA, 527 bp; double-stranded, linear
agtgaatttaccnaataaattaacagttttaagaatatttatgattccgatttttattattattgtgtcggtgccaatggactggggaacgattagttttggcgacacaacgttagccgttacccaattagtgggcgcgattatttttgcagttgctagttttacagactggttggatggcaaaattgcccgtgcacaaggcttsgtgacgaacttcggaaaatttgcggacccattagcggacaaaatgctagtgatgaccgctttwatcgtcytagtkggtcaaggcaaagtacctgcttggattgtagcaatwattgtttgtcgtgaattggcagtaactggkttacggttgttawtagycgamcatggcgaaktaatggcagcagcttggccaggaaaagtaaaamcagcyacccmaatggtgcaatatttacygktcattamcaacatyccatttycagactcyaccactagatcaaatcatgccatatgcctgcttgaattttcaccatttactctgggag

SEQ ID NO: 746 - DNA, 772 bp; double-stranded, linear
acgtatccagataaaaaccggttgaatcaaacgtcatntaatggtattntagacgagttgttatccttttatgaacaagcaggggaaaaagtggatcaatttggccgagtttttgaagcggcctttgctacaaccgaaaatggccatttgttatcaggtcccatgaaacgattattgggattgttgttacaagttttatggagccagcaagtcaatcactttgactttcaatttaaaaattttatcatttggtttattcgcttaggttttccggtggcgtttccaaaagaaattttaagtgctgattacgcagaacaagttttgcttcacacagaaacactaggtcctcctatggtgttggaaaaaatcggtcaactaggagcagctttaaagccaacgcccgatcaactgttaacaacgattgaaagataccaagaaattttaaaagagatttgaggggaaattatgtcatatagtgaaaaaatggttcaagcattacaagctgaaaatttagcagaagcacagttaatgtttgaagaagcattaaagaaagatgatgaaaataccttagctgatttaggggaaacgttattatctttaggttttctagaagaagccaaacaaattttccaacagttgttggaacaatttcccgatgcagatggcttaaacattccattagcagaaatcgccattgaaaataatgaaatagatgacgcattcatctatttagaaaaaattccagaaactagtgacagttatgtccaaagtc

SEQ ID NO: 747 - DNA, 1112 bp; double-stranded, linear
gcccttttaaaatttgtaaccataattctgttacatctttattctcttggttcgttaaagtatacttatttttattaaatacctctacattaaaccagtcattagtaataaaatttycrgaatacattatctcttcacctcattactttctattagagatagttatgcaattaattttgkgtaacactctgggttatctgttaagcataatatgtaatctacgcttgtagaatacaaagtgatagcttaactaaaatatctactggtaccattgttgcaccactctcatatctggaatacgcagattgagaacaatgtatatagttactgacaaaagattgagtataattatttttaattctcaaaaatagcaacctagattccataatttttccctctcctgtatgctatctttgtttgttaataacagtcaatatattattcggattctgcataattctaaaatttttattatttatcaatcacgagaaaataaaatatgtctatacctttataaaaggtaaaaatttgtatttctttattatttgttttataatataagtatccattgagcaaaaacgctcaaaataggctgatcgagttaatcgatcagcctattttctttagatttatattatttactaaaactatactgtcacgaaaaacaacatatataatattatgttgttttattcaaactataaatgataatatayytaaatatataatagagactgtctcttgggggagacagtctctaaggttataacttattttagcctttcatttctaacaaataatcattcatagaactgaacgatcaattcattcagtctgaaagaaaatagttaaatctgaaatagctatttttattttacagtatctgccttggcctttcaatttccttgatattacttttatttcaggattatttaacataaacaaatacttctgaatcttttacataaatgtcatggtaataattagatttcattaattcactttcttctttactcaacgcgttaatatcaaagatctccatgttcacgtttaaaccagtgtacgttctaaataaaaactgatttggccaataaagggcttcatttggtgga

SEQ ID NO: 748 - DNA, 864 bp; double-stranded, linear
gggcttccatttcnggntatgcngatggcgcatcaaaacttgcacgtaggtagtctcccgaaagaggagtaatgctaaaaaaatatggtcgcmctttcggaaaagcttcacttggtacatttkgattggcgtgatgttcattatgtaggctttagcaatttatttttttcaacagttgttagatcattatcaaaaagtttccaactagggttgttagtagcgtatggaacgacaattattttaattcctctattgtcttactgtgaacagaaaccgaaagcttacttaactaatggcatctatttctatttgaagaaattaagtttaataaaaatgagcaagatttcctatgaagaatatctaaaactgggagcgggggctttactacaaaaagtagaagttggtgcagcagctgggagaaatatccacttgaatttttatgggcgcttatttcgagagttaattccagagacgttatttaatttatttttcatagcattgattgataaaaaattattaccagcaattctaattggttatgtgattgtatttattttaaccaaaatacttttgaaaacgctacaaaaaatgaaagaaaaaacacttatttctgaagaagcaatgaatgctactttgatacgagggatgaccgaactagtaacttttagaattaatcgaaaatataaaanagagattganaattacgcgttaatggcagagggaaaatagtcaaaatataacaaaaatggactatggatccatggaatttttctttgggcttttttggccttgttagttggcacttatccaagtaagtattgtccgtacttaggttttacctaacgncgnggcgcccagtttagg

SEQ ID NO: 749 - DNA, 1376 bp; double-stranded, linear
accaaccttcaagataagttttaagtctgtgcccttacacgagatttttttacggcaaaaataatcctttggtagttcatccagcacaagcacatttttatataactgattaatttggtggaattatagttatatctatattgattantagctgatcttgctaagcatggatttaataagaatatttttgttaaaaaatcatatanccttacgtgtagtgctgcagcactcatttcaaattcttcgcaaatttgacggaaagacatttgcttttttaaacattctttcaatgcttcattgtttattaaagcaagggatgcaaatatattagctcttatttcttttggttcatcttcgctagtgtatccttttccagtaattaaatctgaaaaactttgagacttgcattccttattcatatcaaaaaaataatgtgcagattcatgaagtattgagaaattttgccttcctttaaccattgttggattataggaaattccgcatttatcgtgaaattttattatgtttcctgaaaatatttttctkgaaacatcaccgaaactatagggaattatgtcaacattttctacgtcaatcatataatctttgtagtgtttccatcttaactcttttagttcaattccatagtaattagcaactttttcaataataatatatgtctggtcatgatattcaaaataagtatcgtagtctaaatacataggggtcatccaatcatttatttttaagtcttgatttcatgaattctaagtactcttttaattcttctctgagctgatctttttcggattcggtkaaatcttctgtatttacacggaagaaagttgtaatttcatctycttctaagttattagaatttggattatcagttcgtccaagtaaataakctacagatatattgaagtagtccgcaactttttttaatttatcagaaccaggagtattcttacgccatctattaattaccccgtttccaaatcccaatgtttcttctaattgtcttattgacattttcttttcgctagcangtaattttattttnttcgtataaatccacttatatcaacctttctagaaatacaaagaaaatatgtatacaaaaaatctacaaaatggttgacaatgtagaanaaatgtatataataattcttgtaagttaattggatagaaaaaaagcaaactaaaaacataccttacagcattaagtttggcgaccgagtgcataataaaggttttgttataggcttatttaactatgttctgattgtagaatatttgtatacataagtcaatagttttataaattctatctaattaatttacaaaaaatactaaagaaaggagaaactaatatg

SEQ ID NO: 750 - DNA, 669 bp; double-stranded, linear
ttttgtaaatgttgtcattccattttatttgcaggatgcacgcaaactaagtgctagttatgctggtctattaatgatggtatttccgttattaatggtggttggggctcctctgagtggctatttgacggataaaattggcccaggtattttaacatttggcggattgttgctcttgtgctgtacgtcgttaatgtatatgtttttagatatgaattcgcctatctggtattatgtgattgcaacggccattatgggcttgggaaatgcacttttccagtctccaaacaatacaatggttatgagcagtgttgaaaagcaagatttaggtgtagcaggaagtatgaattcttttgctagaaancttaggaakggycatkgggattgcgttgtcaacgaccattttatatcgtggcatgagcgaacctaatggtgaacgagtaaccacgtatctggctaatcgcccagatatatttattgtgggaatgcgtgaaccttttttgtcgcctttctattatgtgtggcggcctttatattaacgattttacgttttcggaaaacaaccaaataagtaaaaagaaacagacgagaaagattcatgatttttctcgtctgtttctttactagctaagaaaataagcaatgcgattgtatatttctgatcccngn

SEQ ID NO: 751 - DNA, 500 bp; double-stranded, linear
aaaataattaaaaacaggagtgataaacgtgaacgtattagaattcggcggtactcgctagcatcagcaccacagttacagaaagtcttacaaatcgtcaaggaagagccgcgccgaacgtttgtcgttgtatccgctcctggaaagcgaaccccgcaagatattaaagtgactgatttattgattcaatactatcagcgctacttaaataatgaggaaattgaatcgacaatctctgccatcattcgtcgttatgaagatctttttgatgaattacacttggataaagcagttttagctgatattgctatttcgattcgccaattagccactttaccaaagaaaacaatgcttttttatttgactattttttagctagcggtgaggacaataatgccaagttgttgccagtttttcaagcaaatggcttagatgctcgctacattagtccaaagaataggnctcctagtgancctgagccagcatgccgcattttacca

SEQ ID NO: 752 - DNA, 346 bp; double-stranded, linear
tgagttttacaacgagttgcttaatgaagaaataactagtgctcaaaaaagaaaaatgagcaatgatattaaattcttagcgagtattttaactaatatttcttgctacagatactcaattactttaaatgatgttttttttagaggtaagaataaacttggctatttgataggggaatttggtgttaaaatagtaaaatcatattcgaactttatattctcatgtttatcaggaggcgagtctatatataatgtggttttaacatccaaaaaaggaagtaagttaaaagtgatagattttaattctgatgaatatgagatgtcttattggtgttagaccngatac

SEQ ID NO: 753 - DNA, 685 bp; double-stranded, linear
gtcgattggttagtacttaccaaaggaatgaatcgataaaaaaaatagcagtgatggcgataaccgctttgacttctgcggtcggtttgaatttctttytgattccggcaaaagttttttcggcagggatgaacggaattgcgcaaatcattgctacattattatatacaaatttaggaatccatattaatacagggattttcattttatttttaaacattcccgtcttcattctagggtttgtaaaattagggaaacaatcaacgattcttagtttcatcaatgttattggtatttccgttgtcactatgtttgtgccaatcgtaacagtcacaacgaatccttkgatgaacgcaatatgggtggtgtctagtcggcgttggcgcaggcttcatgaaaatgggctttaacactggcggcatggacattatttcactgattcttcaaaaacaacagggaaaacagttggtaattttatgttcttattaaatggtawtattgtgctgttggctggttttgtatttaactgggaaagtgcgttgtatactattatttctatntactgtttgagtcaggtggtcgacatgattcataccagtcaccaaaaagtcacagcaatgattgtcaccacgagaccagaagccgttgccttagaagttctcaacaaatcgctcgtggcatganc

SEQ ID NO: 754 - DNA, 682 bp; double-stranded, linear
ggtgaatgttttaccgtcgctaagattctcttccagattataaacaagctgtggcaactctgcgccggtcgtttgttctacatcaaagacaggcgttaaaaaatagcgcgtctctttgacaatttctccattttcatccgtgacttttttcccattcttatcgactttatctttaaaataaggggcatacacatacagtgctttgctgcctttttttacttgacgatctaactttttccacgcattgtaaccagctacacgacgtatgtttggattttgtgccaacaacaaacgaatattttttgacgaatatttatgaaattttgaagcaaaatctaaatagtttttaaacgtatcacttgttaaatactctttgatcccgtcgttcaaakgctgcgataatttttgataatctttctttttaattatctcttccaaggkgatttckggttggcytttttgcttcatttgtgttttttcagacattycttwattcctttctctggatcgtttttttgcttcttgacgctttaattttgcttcttttytctttgtttcattctttgttttctttaaaatatcgttccaatctgtkttactttttccttcaattagtttaggktggtcaagagtaatngggacaccagtgaattggaaaatggtgggaataaatttccttccc

SEQ ID NO: 755 - DNA, 345 bp; double-stranded, linear
ttgagggcttgtccctctactcatcggagattagagaggtcaaaaattgacgaggtagagaaaatatttgaaaatattttttaataggcatgagtaacggcaacatccgtcagattggatgttgccgttgctcttacctactaaggaaatatatacgaatctgcttaaatgctctttgaagcaggcgagttaccgccgacgggtcacatccgaggataactgcaatctccttgtattgatacccttgccagaagtgaagttcaatcactcgccgctgccggtctgtcagacggcttagagcagccgataaatgctcattctgaacagagtccataaaatcctgct

SEQ ID NO: 756 - DNA, 608 bp; double-stranded, linear
acgttttatatatctttttcattagtcaaaaagcgctttttgactaacgatgctactcactataatacgttttaaatcgtttascaagtctttttattagagaatgttcatcttagataagaaacccacctattttgaaaaaaggaaaatcaaaaataagtggggcagcagtcgaaacgactgctgcccacttgctaactattaagataattccctgaacaaaagtagctccttttattcctgttraatttaaatcacttcttcttcctcttcgacttcagagaaatggaacttaatcatttcaytgacgaaaattggcacaaaggataggaaaattgctaacatccaatgatttaaactaatatgcactaatccaaatagttcttgtgtgaatggtaataaagcaakggttgtggtaattagtaatggctaaaacgaccatttcaaagagcgacttgttgctgataattttacacggaaaacagagttcgcactacgaacattaaagacatgtaagatagaggaataagctaagattaaaaatgccactgtttgtccaacttcatancgtttgananataggctgaaacaccggtacaaggcaccta

SEQ ID NO: 757 - DNA, 1672 bp; double-stranded, linear
gattctccctcataatctaactcagcttgtcaactttagctctagnattttnccttttaacatggaactntcattattatagccccctattgtaattcaaatgtaaaattatctattaatcttgtttttcctataaatactgctattgcaactaaaactgatttttcaatataatttactctttgtaatgataaagaatcaacaacttctacataatcaatctttgccaaattacaagtatttatatttttacttattatctcmattatttttragctatctctctctccattatttaaggcttccttrgctaaagttaargatttatttaaaatagtagctgaagatctttcctctaaacttaagtatgtgtttctagaacttttagctagtccatcctcttcccttataattggacaccctacaacgtctatatcaatattaaggtccctaaccattcttttaattacagctaactgttgtgcatccttttctccaaaataagctctatctgctggtattatgttaaataayttacttacaacagtgcaaacccctctaaaatgtattggcctactagctccacataaaccttctgttaatccagttatattaacaaaagtacttgcattgtcacaatacatctcttcaacttcaggattaaatattgctgttgctctacctcttgtgcatacttctatatctctttctaagtctcttggataactacctaaatcttcatttttcccaaactgagttggatttacaaagatacttacaacaactttatcattntcttttgatgcttttctaattaaactttcatgaccttcatgtaaatatcccatagtaggaactaatcctacctttaagccttgttttttccactcttttacttgacttctaacatcatttactgttttaaatataaccatatttcttgacccttttaatataatttttctaaaacatcatcacttattttaaacccatgttctggacctggaaaaactccatcttttactncctctatatattttgtaaatgctttattcatctcttctgataaattagcatatttcttcacaaatttaggggtaaaatcactatacatccccaacatatcttgatatacaagaatttgtccatcacaccctgcacctgctccaataccaatkgtaggtattgatatctctttagaaattaactctgcaagcttagttggaacacattctaacactacagcgaatgctcctgctttttctacagctttagcagctcttattaattctttagcagcttccttgtcctttccttgtaccttaaatcctccaaatgcattaacagattgaggtgttaaacctatatgcgccataacaggtatagaagcctttactatagcctctattttatcgcatacttctatccctccttctaatttaacaacctgagctcgtccttcttttattaatcttcctgcattaactactgaatcatatactgaagtttgataagacataaatggcatatctgcaacaactaaagtgttcttagctcctcttgtaactgctctagtatgatggaatcatgtcttccattggtactgaagtgtatcttccatgtcctagacataccataccaagaggnatctcctactaagtatnccatttat

SEQ ID NO: 758 - DNA, 734 bp; double-stranded, linear
ttctcacacagataataccagttgaaattttattcgtcaactcaataaatgtaacttttacattttgatgaagaaaagcctattctatcaacaaaaattttttattaaaggagattttatatgtttttacaaaataagaatgtcgtcgtaatgggtgttgccaacaaaaaaagtattgcttggggctgtgcaaaagcattaaaagatcaaggggccaatgttatttatacgtatcaaaatgaacgcatgaaaaagcaagtggttaaattagcagatgaaaatgatttgttggtggaatgcgatgttgcttctgatgcgtccattcaagcagcctttgaaacaattaaaaatgaagtgggcacgatcgatggactagtccatgcgattgcttttgccaaaaaagaagaattgtctggaaacgttagtgrccatcactcgtgatggtttcctattagcacaagatattagtagctactctcttttagcagtcactcattatgcgaaacctttgttaaatcctggttcaggaattgtcacattgacgtatttaggttccgaacgtgcgattcctaactacaatatgatggggattgctaaagcttctttagaaactgccgtgaaatatttagcytttgaatagctgcmgaaaatcgtgtcaacggaatctccgcaggncggattaaaacattggctgtgacggtgtaaaagactacgatcaattgattagtattcng

SEQ ID NO: 759 - DNA, 1262 bp; double-stranded, linear
attattcaacagacggagaagtagatgagtatcttacgcaacttattttgaaagctcgtcaagcaggtattttctttattgttgcaatgcaacgtccagatggagaatttttaaaaacagcattacgtgaccaatttatgtttcgcatgtctgttggacgtctatctgaaacaggtattttgatgattttcggtgatgaaaataaaaataaaaagtttaaatatgttgaaaaaattgacggtcagaaagtctatggtcgtggatatgtggctcaaggaggaggaactgcacgtgaattttatagtcctcaagtaccacaagactttgacttcattgaagaatttatcaaaatttctaaagagttaggttatgaagatgttccaaaagaagtacaagaagaagtatctcaaaaaatatctaaacatattgataaagaagcactggcagaaattgatgaagaatttcaagcagaaaaaaatcagttatcagagttaagtgagaaatattctgcttaaaaagaagtcacataaattagttggaaaaggaaggtttttatggattctaatgaaataattaaacgtgtcagagaacgagtatatagagaagtaaagaaaaaatatactagagacgatttggatactcgtattcaagatgtattatattatcgttcagaaacatatatgaaattagttagctttgcaaatggtaaaagaattaagaagttagctgatcctagaaaatttgaaaagtttatggatacaaaaggagtaaagattgttgcagaagtacttgatggattgaataatcaaccaaaaatgcaagctatggratacgaacaaaaggtacttactaaagtacgtcaatggtatcagaaaaagaatcaccctgagcttgtagatttggaagaagaagcatttgaacaacttgtagaaaaaaatatcatctataaaaaaatgaagaaaaggttgtatgaagaacaggataatcaaggttttgtttattcggataattttgatatgcaattgattcgtgattcatgtgatattgaagaggctctatacttagatatcacgttgggggattactaagtgaaaggagtaaaaagaaagtgaaatttaaatctcgagtacaaatgttaaactatgtgattgggaagaaaccagacatcatgaaaacagtgatcggagagcagaaaaagaggggggtacagatgataataggttacttgattataaattattagtaatttcngntttaggtgc

SEQ ID NO: 760 - DNA, 776 bp; double-stranded, linear
cacngacttaaaacttatctggaagtttgttgataanactaccaccaaaaatggaggnattatagtatgtttttatttggaaataaagaagaaanaaaggtaaagaaagcagaagaaaagcaaataaaagaatattttaaaaataatcatgatattgtaataggcggtatttattttaatgattcagacaaaaaaatatttatcccaaaaagtatttctgaatcaagaaaacaacaagttatcaactatgatgatttgattagttacacagatatttttgttggtggcaatataaaaaaacatcacggaataactcgtgcagttgttggtggcgttttagctggtcctgttggggctttagttggtgctggaacaggtggaaaagaatttacttccattaagcaattaggagttatgttacatcttcctaataatcagacagtaaaatatatgttaatcacaactgaaacaaaaactgattctatgattggtaaaggtttaatggataaatacaacgaattaattgcaaaactggaccaaatactaaaaactaattcaagtaataaagataacactgtattatcttctgcagacgagataagaaaatttaaagccttgttagatgatggcattattacmaaacaagaatttgaaataaaaaaacgtgaawtgttacmataaaaataacgcaccctctccggctaagaagttagtgcgttaaaaatagaaccaaaataggctwatttkgttacgcctattttaccacaaagaaaagg

SEQ ID NO: 761 - DNA, 927 bp; double-stranded, linear
attgctttttcaatttggtcctgaggattcccagaccctccgtgtaatactagaggtacatcagaaccgacagcttcagcaatcgcttgtaagtgatcaaatgctaaacctttccagttttctggatattgaccatggatgttaccgataccacatgctaagtagtcaatacctgtagcaaccatttgtttacattcttcgatatcagctaattcgccagtaccgatgattccgtcttcttcaccaccgattgaaccaacttcacattcgacagaaatacctttagcgtgcgctttttcaactacatctttcgctaattttaagttttcttcgaatggtaagtgagaaccatcaaacatgattgaagtatagccaacttcgatacattctaaagcagcttcgtagtcaccgtggtctaagtgaattgctactggaactgtgatattcattgagtctactaaattagtaatcatgtctttagctactttgtagccgcccatgtatttagcagcgcccattgatgtttggattagaactggtgcttttttagcttctgctgcttctaaaatcgcttgtgtccattctaagttatttgtgttatagccacctactgcatacccgcctttacgtgctgcttttaagaattctgctcctgatactactggcataaaaaattcctcctaagtttttaaaaactttatttgttaggtgttccctaaccaacggttctattttagcagaattcctgacacttttctagtaaaattccctttttcagaaaatttttgtctattctttcacataaccttcatttttataaaaaaacctccagttttcccgttaagactttgggacctganggccgacttgctattttaattngtcttggtggataacgttcaccttgtaggatgaagcncaggaaat

SEQ ID NO: 762 - DNA, 528 bp; double-stranded, linear
aattaccaaaccactgaattagaaacaagacaagcaaaagaacgggccttagcagcagtttcmgcgattgttgaaggaaagccaatccacgttattttttcrgggaaacctggtgtcggtaaaagtcatttggctatcagtattttagttgaagtcttagaacgctctgcatatcaaaagtattgtttatttgtcagctactctgagttattagaaaaactaaaaatgtccatgaatgaatcggccaaaagccaagcaaaggctcaagcgtatattactagaatgaaaaaagcagacgttttggttttagatgatttaggtgctgaattaggaattaraaataaagttagtacggattttaataatgacatcttaaaccgaattttagaagctagacagaatagagcaactatttntactactaatttttccggaaacaactggtggaggcctatggaacacgcattanncctcgtctaatgagcacgccaatggctatgtntccatatgaagacacacagacaacga

SEQ ID NO: 763 - DNA, 500 bp; double-stranded, linear
gctgaagctgatccaatatatatcaaaacacagctaggacataaagagataatacagtcatatgaatacgcatcagctactgaagcaaatagaaaaaagaacaaagaaaaatatgaaaacaaatacaaagatattttgtaaatacccaaaaattacccaaagtatatctaaattgttatcttgatgtatatattaaaacatatagaattgtttttaattaaacagcaatattcttgaataattatctatgaagctggcaggtggctctttattaaaangctaaaacctttatttattaaaggttttagcttttttcattaccgacatacccaaaaagtacccaattttnttgtattattttrtatttcttgatagacaacacgaacgaaagttcgatataattgtattagggaggacgatatcatgaaaactaattatgtaggagtagttgaaaagattaaaatgtnaagtatgtatccaaaaattttaggtcgattctc

SEQ ID NO: 764 - DNA, 446 bp; double-stranded, linear
atttatttttttagtacaaaaagtcagcaattttttgcgtatgtttgggccattttcccagtcatcgccttttttttggttagtttttatacattggattttttattttccccaagctatttaattatggtgcctgtatttactattatgtttaaaattaactataaaaaagattattcgtttgtagcgctgctcaaaatgagtatcaggcaatttgtgatcagttttttagcatttatagctagtagttcctttagctggtctattattttaaatagtagtgtgacatttttaattgtttatttattttattcatctgcgacaccgatgcggtatcatagttatttgatgatgtttacgttttgtcagttaatccaggttaaaggaaatacatttttgatgcaatctcaagttgtggnctttttaattggtctttttttattggc

SEQ ID NO: 765 - DNA, 594 bp; double-stranded, linear
tattttttctgaactgctcttgctttcttccgctccagaagtctgtgtttttttcatttgttctggtgtgggataaatctgttcgccttcttttgagagaaggaaacggctacgtgctaattttgccacataatcatcatcttttaacaaagcaacgtctttttttagatccttgaccttcttatcaactgctacggattcagcaattgcatctgctcgttcttgtttgaaagcacctaagcgatgataatctttcatcaattggatgccagaaaaggcaaaaataatgaaggccacgagaaaaatcgctgccaaggtctgcgtctaaaaatcaattgtttctgttgkttttggaattcgacatactgttctttcgtgtagtcattttccaatgccgcaactttcytcgagtttttttcattctttcccatcgtctcgctccactcgctttggattgtccgttttattataccaacatctaagaacctngtctaatgttaatttcagagaagttaaagaaaatcaagcttttttctaaaataatccttgcctttggaaataaacagcggtngattantaaattttttccaaaag

SEQ ID NO: 766 - DNA, 516 bp; double-stranded, linear
tgattattttcccttggaataccttagcaggcacaacggtgagtccatttgttatggtttttgaaaaaatgaatattccttttgctgctgacatcgtaaattttgtgattattttagccttgttttcttctattaattctggagtatacgcctcttctcgccttttatattttcgcttaaaagataaaaaaggacccatgagtaaactaggggttttaaacaagcaccaagtacctcaacgttcagttttcttctgcgccagtgttttatatctgggcgttattctttcttattttgttggcgatgaattatttggttacttagccggttctctctcttacactgtcttgctaatttggatttaattagcgctgcggcgtttgtnctgtctttaaaacgagggtctctctttgaaaaaagtattaatctccttgcgttaatcattttaggtctcatctttattggcatcttatttacaaattcgtaggcgtcactcytttaacaggcctactgtac

SEQ ID NO: 767 - DNA, 864 bp; double-stranded, linear
tacggctttgagcgtgtctttactagtttattgcaaatcaatgatgatcgggaaaaggtattagcagagtttaaaaaagtcgtagattacgccaaccaattaggtatggaagtgatggtcgatattaatcctgcattgttcgaacaattaggcatctcttatgatgatttatcatttttccatgatatgggcgcttacggtattcgtttagatcttggttttactgggcaagaagaggcgaatatgacaagaaacccttatggtattaaaattgaaattaatatgagttcmgggacaagttatgtagataatattatggcctactcaccaaacacagaaaatttactaggctcacataatttctatccacatcgctataccggcttaggctatgagcattttgtttattgttcagaaaaatttagaaaatataatttaaatacgatggcgtttgtgaactcacacgatgctacatttgggccatggccgacacaagatgggttatgttctttggaagaccaccgcgatttagaaattgcaacgcagttaagcatttagttttaacaggattaatcgatgatatttctgtcggaaatgcttatgcctcagaagcagaattagcagcaatggcagaagcctttcatgcaccgtatccttcgatcaaagtggatacagaaccagaaatcacagaagatgaaagaattgcattgttcgataacttacacagttatcgtggagatcgttctgattacgttttgcgttcaacaatgacacgtgtttactataaagatcgtcctttcccagctcatacaaccgagagatatggttcgggcgatgtccttgnattgacaacgnnggctatgg

SEQ ID NO: 768 - DNA, 1207 bp; double-stranded, linear
atttgcttttagcaaataggaatcttaaactttaattacaactaatttattctaatttaaggagagaaaaatgatttccagcaaatacactattagagaacaaaatgaagctcaaatacttaatcaaattataaaacatagagaaatatctagagccgaattaagtaagatcacctctttaaataaagcatctgtttcttcaattacaaacaaactaataaacgatggattcatcattgaaaaaaggatcggagaagctacaaatcgaggaagaaaacctatcatgctgacctttaacggtagttcttcagccttagtaattgcaattgatctaggctataactatatagatggcgcattagcttctttagatggaaaagaaatccatagggttcaacttattgatacctatgttaacaaaaaaaatgtccaagatttaattcataaagtattcaatcagcttacttcagattgtcctcatacccattatggcatagtaggtatgacaatagctcttcaaggtcaagttctaaataataaaattatcagtacttcctacaatgatcttgctgaaataaacctagttgaaatgttaaaccaagaatacaacttcccagtattcttacaaaatgaagctaatttatcagcgttgggtgaatatactttttcatcagatatagaamacttagcatccmttmgtcttcatagtggcattggtgtcggacttgtgaaaaatggtaaactagatgktggtaataamggttatgctggacaattaggacatactattttgtttcccaatggaagaaaatgtacttgtggaaatcatggttgcttagaaaaatattgctctacacaagtgatttatcacgaaatttcgaaagagaaaaatctcaataaaataaattcagatgtagtttctattctatataataacaaagaatcaaaagttgttaaaatgattgaacaatatgcctactatttatctattggtgttaataatgctatcatgttatatgcacctgaattagtaattttcaatagtccattaacaaaaaaaattccagatataataaacataatccaaagaaatttaaacaatcaatttacaaaagacgtattagttattaacagccctatcgaatggaatcctgtaattagtggagctatctcactttcaatacagaaatttttaaatattgaacaa

SEQ ID NO: 769 - DNA, 772 bp; double-stranded, linear
ngataatcactgcaccatcatgtagtggtgtatttggaatgaaaatattaatcagtaattcaccagtaatatcggcatccaaatcaatacctgtctcaatgtattcatctaaaccggtattgcgttcaatggttatcaaagcaccaattttccgttttgacatgtactgaatggctttgtcaaaggcctgaataatacgctcatcttcttgttgcgcacctttattcgggcggaaaaacgaacttctccctagatgttccagccctcttcgcacttctggttgaaaaataacaaccgcggcgattacaccatacatgatgacttgattcattaaccaagataatgtatgtagaccaattatctcacttagaatgcggataatgataaaaacagcgacaccttttaatagttggactgcttttgttccacgaacaagcatgattaatttgtaaacgaggtaccatacgactaggatatctatgatatkgataacaaaatccttagataagaaatccgttgagatgacttgctgccaataattcmaatctaataattgattcaatkgaaacgacatcatacccctcacttctctctcaagattycctaacaagtataccacattattttctttcatcacagaacgcaagcggaaacatcaggaaaatttaggaactttttcaaataacttgaaatttttcatcaaaaaatcgcatttctaactaaaaaacgtgtgctaagcnaaaagctncagacacgtttttttggactncta

SEQ ID NO: 770 - DNA, 706 bp; double-stranded, linear
gacnagcttctaaaactcggtccacgtctaattcggagtgcatatactcaaaaacattgaacgtatcactatttgacaacgtgtttaagtctaagaccttaatcttgtacttgccttttttcaataaaagtccaatctctggcaatatcccaccgtctgggtctgttgtgataaagctagcatgtcgttgcataagattggttttgataaaagctaacgttttggccgctccagagtcacctagaatggcgatattcttatttttttgtagcttgattggtaaacgtttattaaaaagagaaatttttacatgcttactaacaataatattgttttcaggaattggatcttcatattttttcatttcagcaggtgtagcaaaacgagccgaaccgtattcttctccatgacggtagattccacgatcattatctcgcacatacattaatagccctaaaagaaaaccaagtattcccacactaaatcctaatagacttggtgttataaaaaaccgataaaaagtttgttcgatatacgttagaatatcttttgtaaagagataattcgtttttgaaaaatagtctgtccctggtaacagccaaaagaaatttcctattccaaagccaatcacaaatagaaaaataccaaggagagatacgggttcagttcctttttggtacgctgcatcacagttccctccttttgg

SEQ ID NO: 771 - DNA, 635 bp; double-stranded, linear
ccaaagggaggatttnatgcaaattaggcaggtacatgttagggcatcgaaaattaaactgcaaagaancatttacgatcgctttggggacgatagaatcagcggatagtgcaattgtggaaattgaaacagaagagggattagttggatatggagaaggagggccaggcatttttattaccggtgaaacgttggctggcacgcttgaaacgatcgaattatttggccaagcaatcattggcttaaacccctttaatattgagaaaattcatgaagtgatggataaaatatctgctttcgctccagcggcaaaagcagcaatcgatattgcttgttatgatttgatgggtcagaaagctcmactgcctctttatcaattgttaggcggctatgataaccaagtaataacggatattacactaggtattgatgaaccaaatgtgatggcacaaaaagccgtcgaaaaagtcaaactaggttttgatacattaaaaattaaagtcggaacaggaattgaagctgatatcgcaagagtaaaagcgattcgtgaagcagttggctttgatatcaagctccgcttagatgcgaatcaggcttggacgcccaaagatgcagttaaagcgattcaagcatta

SEQ ID NO: 772 - DNA, 1102 bp; double-stranded, linear
tnattaatatctatatttgaaatgttatcatcatataattcaattgtcgctaaaagttcacctacagttcccttacaccaactattgtttttaggttcttcttcaaagtatgattctttaattttatgaagtaaagaatttgccttatctatcctattgaattttgatagaagatggacatagctatatataccgtgtccgaatcctctgaaattaaaatagggttcttcggataatttttcaaaaatttctaatgaaaattttctatatttttcatcctctgttatctcggataacaataataaaacttttattatactattatgcccgtggatccaatcattttttaactcgccattatttatcggtttcttttcaatcaacatgtctggcaatttctanggactacatttaaagagtttatatcattatttaagcggnaatctacaagtaaaggatatattaaacttccttttccaaaaaaagctgacaatatatcttcagatggtattgtataaattgaattttttatacattcaattacatagtcatatttatgatyctttgtaatgtatttaagagccacataaaatatgaatataccaggcaatccatcgwacatattattatttaggattcccacattccaatcttgatccaactttatgtcaatccaatttacagtattggtttttttattaaaaatagctctcttgaaaatttttttctctatcttctgacatgcttgaataattttaccgtttagctctaagccagtataaatatatttatttgaattttgatttttcaaatcattaatatatttatatggattataaatattcaaagcaatttctagccaaacggtttgaatagaaatatcttcrtcacarrgatcatttattttatttaggcatctattcagagcgcttncttgataaaaatcttctactaagcacccgtcactagctattaatgatgtttttgagatattgttataaaaaatgggtatgtctccatctattaagtctgaaaattcgtaatgaactacctttttattcttatatggataggcccacatattatgaagtactttttctct

SEQ ID NO: 773 - DNA, 1081 bp; double-stranded, linear
tatgattgtttaggttgtagttgttgcaattcggcttctgttaagggccgatattcccctagttctaacgtttcatccaaccatagttcgcccattcgtaatcgttttaaatacgtcacaggtttgcctacagtggctaacatccgtttgacttgatgaaatttcccctcttgaatcactaaacggactacggaagtcccttcttcctcattgatcgtctcaatgactaaacgacttggtttaaccatttctccatctttcaaggcaaatccttgcgcaaacagttgacaatcttccgctgtcacaagtccttcaacttcagctaaatawtcyttatccacatgctttttgggkgataataattgatgcgctaactggccatcatttgttggtagaagcaagccytcggkaycttwatccaagcgaccaactgggracaagtcggcacggkaatcctgatcagttaacaagtcaattaccgtttcatctcgctgatcttccgtcgcagaaatgacaccttgtggtttatgcaacatgtaataaaagaatttctgatacgtaagaatttctcccatcaaggcaatttgatctgtttcytcatttacttgtgktttggcttcttttacgacgtcaccattcaccgkaacgacttttttctttaacaattgtttgatttctttacgactaccgataccaacatcggctaaaaatttatctaaacgcatcgtcattcctctttcctttaaaaaaatagcttgggacataaatcgaatcgatcgatgtctcargccttgtctcttaagagaatctgctgaaaggagttcaatcagctattatttaatattgaattttgcacgtaattttgcggcatttttccctaataaacgatcagctaagcgaatcttcaagaccgaatagccataaaaagcgcctcctgcagcagccacaattacaacgataatgaaggctkggaaaangtctagttggatctaaaaatagatacaagaactgacggaaaatcaaagngataatcatcatgatgactgtnatacagaacattaacaatgttcgccgtaaggtt

SEQ ID NO: 774 - DNA, 471 bp; double-stranded, linear
ttactaaaaaattgtttaagattgtccatagtactccctctgtttacgtttcttggctaagtctaccatattcttgcaggtacgacctaggtctaaagcatgaaaaattcttgaaaaacaatttcaatggtcttttcgctgtagcaaaggaaatatggccttcactagaggtaaataattgcttacgcttagaaacgagtctttatttagcctctattctatcatgcttttcttcgttttttatgtaaatttgtttaagaatctctcaaggaactgcctttctaacaaatttcagctttttttccgttctgacttgaccttttgagtagctttgttacactaaatagcgaatcagtgaaaggtgggatttggtggaatattcaatgagattacctgaaaatttttcaacaatgactgtaaaagaactattagaaaatganggctagtcctcgaaaagtgcgccattttttn

SEQ ID NO: 775 - DNA, 480 bp; double-stranded, linear
atggaaagaaagtaattaaaggagcttcaaaatagtttaatatataacttttaggagggaacccaaatggaaattatttacccacctttagttgaagaaggattaaagtattatcttgaaacgacccaacaatcgctagataaaagtactttttatcgttcgatggtagagagaggaattattactgaaacgggtttaccgacccaacaggcaattgaaaatggattagtcaaagactattacgaggaccaagggttatcatttgatgattttttaagaatctatccaatttttgaagagtatgacgaggagttatttcaatgtatcgatggtattgggagatacctgtgatatgaagaaaatttagctcacaatggaatctggcgagtactttgagtgcacacagtcaagcgttctgagacgtagatgagaggaatttgcgcaaaatattagaggcgacgggacgcgaccctgcaaaaa

SEQ ID NO: 776 - DNA, 485 bp; double-stranded, linear
gtgagaaccaatcttaattggtgatccaacagcatattgcaaatgctgctatggctcgtggaatcaacacatcaaactttattattatcaacccaaatgattatgaaaaatgggatgaaatggtcgaagcatttgttgaacgccgtaatggaaaagctactaaagaagatgctgaaaaaatcttaaaagatgtcaactatttcggtactatgttaacttacatgggtattgctgatggtatggttagtggtgctatccactcaacaggtgatacagttcgccctgcgttacaaatcattaraacaaaaccaggcgtgaccgtgacaagtggtgctttcttaatgattcgtggtcgtgaccaagaaagatatktattctcagactgcgcgattaacgtgaacccaactgcacaagaattagctgaaattgctgntgatagtgccaaaacagctgaatnatttgacattgaaccaaaagtttcattg

SEQ ID NO: 777 - DNA, 1388 bp; double-stranded, linear
gtaaattacttcatnatttggnaactacggataatttacctananatgacaattggccaataactattaaaaaaattacttttttaaatcaaatatcaaatgacagcataagtaatttgtataaattgtgggtattaccactatactataaggctatatcggctgataaacctaataatatgaaatactttagtgtatttaaaaagtgtattccatttatttcagatactctttttacttataagttattactaagatatcaagaaacacaatacgaagttttaagagatttagaaagtctatacagttcaatttttcgtaatttgttgaaatttaaagctaatgaaagtcctgctattatagtagaagaattgaaacgtgaaagatcgggcattcttaataattcccaggaaataatacaaaaagctatacaagaattaagctattcaaaaaaaacaaattccccaatggatacggatctagtcaggtatctaattgaaagactaaatgagaataattttaatactcaaagtgttgtaggtggaattgacacataattgagatgaaaaggamcgaatgcagtagtaacataggaatttagtatttttagaaggaattataatgatatggctaataagattaaacaagatttacttaaaaaacataatgatgatgaaaacaaggttgaaagactacttttagaaaagaagtttactgaaatatacactcgtagtgagtatcctcaagtgaaggagctatgccgtacttacccagatggggactttaccgaagtagaagtcaaagaaagagctaaatatatggcaaagtattttatcgatgagtatttagaaatcaattaacagttaatgtaagtaaaataaaacaatagttattgaatcgattacatttttttgagaataccaaatggatctattgatatggggagtcaaccttaaattattaccaatgtaagaaaacgattcatacaactcgaaacagagtaagtcaaaaaggatattacaaagagttacactatttatgaaagagaaaaaatttaaaacgtgccaacaatgcttttataaattaagcaacgttggtttttctgttacttaaaatctaatatctttagtataataccttaatgtattcttagagtacgccataagtggttaaaatacgcattcaatctagtattcatggtgaactttctaaaaataatagtattaattacaattatttacttgagcgttaaaaacaaacttaaagaaaaatgactgtagatttctgagctactttaaattcaaaataattcggraaactgaaattttgttgktgcaaaacaggaccgtttggtccggataatggtactcggaaaggccggtttttgc

SEQ ID NO: 778 - DNA, 735 bp; double-stranded, linear
actacngaagagtacnatngagcaccttgatcccgcacaaaatcggtgccagatccttatatgattgataccacacccatggctgccaccattaaagcgggcgagaccatttccatgacttcgaaaaatatgcgacaaaaaggtcaaattcttttagagaagactggggtagaaacaggtactgatctttggaatgacaattattctctagctggaaatacatttgccattcgtaaagacagcccagctggtgaaattgtccaagaaataacaacggatgaaaaaggtcgtgcggaaacaccaaaagagcttgctaatgctttggaactgggaacctattacgtgacagaaactaaatctagtaatggtttcgtgaataccttcaaaccaacaaaagtcgagttaaaatatgccaatcaaaccgtggctcttgttaccagtaacgtaaaagggcaaaaccaagaaattactggggaaaccactttgacaaaagaagacaaagataccggtaatgagagtcaaggggaagctgagtttaaaggagctgaatatactctcttactgcaaagatggtcagctgtaaatngagtgagctttaaaacagattagtgagggacgaagcttctgtgaacagtgcttggcttagtgaagaccagtgcgtaacnctgcattacggattctgcagaccagcctgagttcttgtgacggatctganntaaagtgtatacgaaaatg

SEQ ID NO: 779 - DNA, 255 bp; double-stranded, linear
gctgtacggcagccagacgttgctgtccggcacggtgatactgttcaagcagctcgataccgatataccggcgtccggactgaagggcggccacacaggttgagccgctgcctgcaaacgggtccagcacaatcgcgttcgggtgtgtgaagctctcaatcagtggttgcaggctggtaacaggcttttccgtcgggtgatgacgattgcctgaatatttccagcccagcacgtcgggcaatggcttctgaggca

SEQ ID NO: 780 - DNA, 677 bp; double-stranded, linear
agatgctgatttctttgcatttgaagcgtgtgagtatcgccgtcatttcttggcttattcaccagattatgcgattatgacgaatatcgattttgatcatccagattactacaagagcattgaggacgttttttcagcgttccaaacaatggctcatcaagtcaaaaaaggaatttttgcttatggtgatgataagtatcttcgccagttagaatcagaagtgccagtttattattatggcgtcacgaagagggatgatatccaagcccgaaatattcaacgaacaacggaaggctcatcttttgatgtttatcacaaggatgattttgtaggtcattttgtcttaccagcatttggccatcacaatatcmtgaatgcgctaggtgtgattgctgtggcttattttgraaaacttgrtatgcmaaaagtcgcagaagaaatgctaagttttaaaggtgtaaaacgtcgttttagcgagaaaaaagtcagtgacatgattattgttgatgattatgcgcaccatccagctgaaattaaagcaacgattgatggcgctcgccaaaaatatcctgacaaagaaattattgctgtcttccagccacatacatttacacgaacaattgccttaatggatgaatttgctgaagcactggatttggcagatgaagtattcttat

SEQ ID NO: 781 - DNA, 373 bp; double-stranded, linear
tttagggatgagacaattaccgatgggcgtttcttatgcggtttggacaggaattggtacagcaggaggcgctattttaggaatgctcttaggtgaatcaaaagacctacgacggatattttttatttttttaatcattgtttctgtgattggtttaaaattaattggttagaaggcgagagaacattgtttggattattgaaagacaggtgagtaaaatttaaaaagagacagaaccaagtgcggtgttctgtctcaaaatagcttttattttacaaggttactataacgtgtcgcaaattcattgttgtaggacttgccgttgacatctkgaccaacgtcccaatttgcagaccaagtcattaagccacgg

SEQ ID NO: 782 - DNA, 706 bp; double-stranded, linear
atgcatgaaattaagtaaacgacaagagcaaattatcgctgttgtaaaagagcatcagccagttagtggtgaacgcatttcggacatactagccgtttcacgtgcgamattgcgttctgatttgtcttttttaacactttcaggaattttaaaagcaagtccgaaagttggttatacttacgaaagtgataatatggaggcttttttcttttttgatgtttttcaaacaaaagttcaggagatcatgagtccaccattgatggttgcccaagacacctcaattcgagatgcgattaccaacttgtttatgtatgatgtcggttctctttatgtcatggatgaagcmaaagaattattaggggttttgtcacgaaaagatttattacgggcctctttaaatacaaatattgatggcacacctgttgctgtttgtatgacaagagtgccacatgtgaaaacctgcacaccagaatttactattcttgaagctgctgacactttgcaaaaatacgaagtggattctttgccagtcgttgaaaaagaaaatcctaaaaaagttattggaaaaattacgaaaacgaaaattttaacctatattacgcaacaagcgaaagaagccgcacaaaacagataagggagcttaattatgaaaaaagagatcattgtttatactatttccgattcacttggagaaacatcacaaaaa

SEQ ID NO: 783 - DNA, 499 bp; double-stranded, linear
tgaacaaaatcgacttcttcataagtcacatcctttatctattaatacagttaaaaaatctgtattacttatagcataaatgaaagcgattaaaaagtaaagttctcttgaaaattcccatgttcaacttttaggctaggttctttttatatgctaaaatagaatagaaacggaggtttttaatggaatggattgaaattaagcacgcaacacaaaataatttgragratatctctgtcaatatccctaaaaagcaactaactgttgttactggactttcgggttcaggaaagtcctccttagtatttgacacattagccgctgaatcacgtcgggaactaaatggataccatttagttcgntttggttccaaaattactttaccccaaatatgggtcgtcccagaagttggaaaaaaatcgagaatccttcctggttggccaattggtccattggacccngaaaaaaagtangcagggnaattcnccgttccgacagt

SEQ ID NO: 784 - DNA, 715 bp; double-stranded, linear
tattcatttctcccctactctctctggtttttatggacgtgtatagattactgtttttttataggaaaagaaatgggcattcttgtatattttgatgtacaatatagtatagaaagcggatacaagtaggagtgattttttatgaactacacaaatagtcgaacgtttaatcctgaaattttatatgcctttgatccttggaacgaagagacccacccttataattgtcatcatcatgaatttctggaaatatctattcttttagaaggtgaatctgaatatattgttcaagggcaacagtaccatgccactgctggtacagtgtttctttttaatccgcgaacggaacatggtgagcaacaaaaagcaggaacttactcacatcaactacacattggcatttcaaatctctatttagaaggcttagcgcgaaacgtatttccaaataaatcagctttattagatttaagtcatttacatggtgcttttttagaaaaagcttggcaaattgttcatgaattaaaccatcaagaagttgaatcagcgttacaaattaaagctttagttattgaactattggtctatattttaagaagcttagcagttgatcaagaaaataaaattgaaactcggctatcgaaaacggaaaaaagaaaacgaaatttagtcaatcncaaccaaaaatngttgcgatggtccatggcgaaacggcgat

SEQ ID NO: 785 - DNA, 694 bp; double-stranded, linear
attaaaattggcgcatttttcaaaaaagcccgtgctatggataagcgttgtcgctctcctccagaaagtgaacttccgttttctccgaccaatgtatgataaccgtcaggtagtttttcaataaagtcttcgcagttagctaaacgagctgcktttttcacttcctcatctgacgcttgactatttccaatacgtatattttccaaaatacttgtattaaacaaagttacctcttgcaaaacaatagcgattttgctaaacanagaagctggagatacacgtttaatatcatacccatcaattaaaatacagccttcatcataatcatacagtctagacactaatttcaagatactagttttcccggaaccactagcacctactaacgcatcacttctccttgtttagccgtaaaagagatatgatctaaaattggggtattgttatcatatgagaaagagacatctcgcaactcaacgtcaaaagatttcagaggactatctgatccctcttgganactggtttccttcatagctctaattcgctgtattttaggngctaaataaaatatttcaagcactgcttctttcatagaatcgaaggaatcctttanttttattgcggctagtaagtaaccaacgacgtagangtatagtcacttcacccgttaaaagtaagtgaacacctactagaa

SEQ ID NO: 786 - DNA, 1800 bp; double-stranded, linear
aaggaactgtnaacagagcaattattttggctagctgaatctttttggccacaagtgtttccagaagaggaagactatttttttggcgtgagcggtggcctcacattttatcaaaaacaaagattggcctcggcacaactatctataattacgcttgaaaaagaaaagacagaggttccaacaatgcctcgttattttgattacttgggcaaagagcaatccttgccagaagccttcagcgctttatatgacttgctaggggacgtaaatcctgaatactatctttcgcaagcgagaagagtcattaaacaagctctgcgaggccgcaaagtcagtactgtgcctaatatttttcaagaaagtttgcacttgacccaagtgattacgattgaccaggaccacttaaaactccttttaccagtagcaacggaacaagccgagcctttagaagcacagtcggatattctagcattttattatgaaaaaattgctaaccgatcggccatcgaacgcttagtttttatgcaacaattgattgagcaactaggtacgaactctctaagttatcttagaataaattaaagttacgataattttattatgtaaactaaaaatcaataacaagaaatggcgccgcttcttagtgagaaatggcgtcatttcttttgcgaacttttttcgtccaaaaaccaccggaaatgaacttaggctcataggaaatgataaatgctctcggctctaattgattgattaatttgtacaatgtacgttcgttttttcttggggaaaggatttctaaaaccattcgttctccttcgcgtccgtaggcgacactttgcgtaacaccatagccgtgttacacgaagtgtttctggtaaatgaaattgttcagtagtagaagggaggataaccgataccataatataacccaaggccaaatagtcttcgattttaattcctacactaatgccaacagcgtaaccaagcgcataaacaagtaaatttaaaggattgtctaaccgattcagaaccatactcagccctaagacataaattgttatttcagccatactaaccagcggtgcaataacccgataacctttcatcgttaacataaaacgaatagtatttaaggtaatatacgcaaaattaatgataaaaatcatagctaacattttcaaatcaacgaccataaaataagtacctcttttcaaaatctttacatccagccctcattatagtacagaaaaactgagaatcaaaggcgaaacacttatagaaatgaattcttttttgaatactcgctcatattattcgcctaatttaactgttatttgatataatcttagtatgaagtaagaaggaggtaagcgatgaaaatttttgtttggattttgttatttttattagtaattaacgttattgctgccttaattactgtttttagaaaacctcgtagtatttccagcgttttagcatggatgatgacgttgattttcttgcctggtatcggctttattatttacttattctgtgggcgaggtatcgatggacaagaagtttttaaattgtctgatgatgaaaaacaaatggttcaacgaattaaagaaaaagtggacgttgataacaaaaaagcagggcgcgataaacgttatgatttactttatgatgcgaaagttttaaatcgttatttccggaatatggacgcatcaccgttggccaaaagaaatagtttgcaattattcacagatggccaagaaaaattccaagcattatttgaagatattcgtgcagcgaaag

SEQ ID NO: 787 - DNA, 976 bp; double-stranded, linear
atttgaatgatttgtaaaatttttggtacaaatagaattagtcctactagcactgcgaaaccggctgttaataaaacagctcctgcggccatgtctttaactttttttccgattggatgaaagtgaaaatccgtaaacatatctacgacattttcaaaaattgtgttgataatttctgccaaccagacaagaaaaacggccaataacaaccacagccattcagcaagtgttaaggaaaacaagaaaccaaatacaatggccgtgacaccaaacgctacatgtttgcgcatattacgttcttctcgaaaaactgttttgattccttgccaggcaaattctaatgaattaataaaatgtttattttttcctgtttgctcatcttttaaggccatacgcatctaaaatctcttctgtaaccaacatttytttycacttcaggttccatatgatcgtacccattcaaatgtaaaagccatgtactgccaaaaagcccatttctcgttccaatgtgtgcccatattcaactgcttgttctgctgctcgctctgttgaaataattaaatcacctagattacgtggtagctctgccaactcttcatcatcaaaaataattggcaattcgtcttccccttcatcctctaaagcaaaactgatgacatctgtaggcatatctttgccccgatagtcacgattaatcatttggatacctgcgttatctgtaaaagtcaccgacatctccgtatcttcggcaatttctagaaaacccgctgcaaattgcagcaagttttcgatttctttgatttcttctgttggtactttctcggtttcatcaatgaaagtaatatccattagtcatctctcttttcttgttcatctttcatttcttctgcttcagctttcatttttggatacttaatccgtgaatggaaggtactgcataatccattaattaatgatttttcaatgatgcgaatct

SEQ ID NO: 788 - DNA, 562 bp; double-stranded, linear
ttaggaatgaccaattttgaaaggggttcgattgatgaattcgatgatatttctagcattgatcaatactatcgagcaataaaagaaggatttacgcccaaagaagccttgtcacttgtcaatttgcgtagtcgagacaatgcccgcacgccttttccatggaatgattctatgtatggcggtttttcaagcgtcaagccttggttaggaatggtggataattataaagaaatcaatgccgaagcagaaataaaaaatagtcaaagtatttttcatttctataagcggatgattgcatttcgtcaaaagagtccctatacagacatcttactttatggracatttgagggtctgtcaaatcttccmgataatgttattgcttataaacgcmaattaaatgaaaaaacgatttacgccttttttaatttkggkgaggcggktccaatcccycmttatttagktaatggcacagttatttttgatacacagtctgaagaacgagagcaattagttcagcagggaacattattaaaaagctatcaaggactattgattactataa

SEQ ID NO: 789 - DNA, 981 bp; double-stranded, linear
cagtattaaaagtacttntcaattacacacttagtgtnccagtttttttgggtcttttcaataaaaatgattcttttttcatcgttttctttcaaatcyaaacaaagcattcgtttgttagaaacaatagctacttatttccgaataattagatttaattaaaccaaaagcaaaggaattcacgaacgtctttcaattaacttcttgtttaaatgggaatttcaggtcctctcacaaagcattttttacttatttttcaaaaaaaacaacgaaagaatagacacagccattctctcgttgcttcatatccttttatttgtaatcttcttcgtaaaaacgtcctaaaattttaacattatctgagatgctgacaaaggcattcggatcactttctttcatggctgcttctaaacttggcaactcaaagcgtgtcacaatagttagcagaacagtttggcggtcgtggcgatacgncccttccgcttcatgaataattgtaataccgcggcgcattttcttttgaatctcatccacgactcgatctgggkttttagtgacaatcataacttgcattttcttttgcttagtataaacggcatctgtgaccttcccacttacaaaaattgataacgcactgtagaacatgtactgccagccaaataaataacctgcaacgaagacaattagtgcgttaaaataaattgaaatcgagccaacggaacgccccgtttttttccgaatggtaatgcttaaaatatctaagcccccagaagaaaccccgttttttaagacaaaaccaattcctgatccagaaatcgccccwccwaaaatagcacagataattggatcttgggtcatcaccgtttgcggaacaatatgcataaataatgaagttaaagtcacggtaatgaaagtaaaaattgtaaacttcttacctatttttttccacgcaataaagaataacggcacgtttaaaagata

SEQ ID NO: 790 - DNA, 432 bp; double-stranded, linear
tttttcgagacgatacagtttatagtttcgtcctgtgttactaatgagaatcgaactagcatttttgggtacatacttaacattctaatcttatcaactactcctacataattagttttcatactatcgccctcctagtaatataattataccgaatgtatgttcgtgttgtctatagaaaaattttgtaaatctatgaaatgataaaaacaaatggtgatacatttggtgatacatctgaaatatctatgaaaaaaatgtaaatagtgaaagacttcaataactaataaatcattgatatataagtaatcggaaagaatgaaatctatggaaatgtttatctaacaaacgcaacatgttcgcttattaggtaaaccaggtttgaagaattagcmaaagatttaaatgcacgtctataattgtaataanaga

SEQ ID NO: 791 - DNA, 533 bp; double-stranded, linear
ctgaaaaaagcaacactagaagttttgaatttacctgcgttgacaggtataactgatgataatttacgtcgtctactcaacaatctaattattgaactgtacaagtaccaggcggaagaagaacgtcgatacattcgtgaaacgcagcaacagggaattacactggctaaagcaaaaggaaaatataaaggtggaaagccaaagtaccgagaaaatgatccacgtcttcagttagcatttaaattgtttttagacggatgcacagataaagragtagaacaacagacagggattaatagaagracttttagragatatagaatgaaatatggaataacaaattctcttagacataagaatgattaaaactactaatccaatgtaaaacagataatatattaaagagggctatagagtaaaatgcaaaagaagtttgaagcaaagcaatgctcagtagacgngttactaaaggcganataagcgattatataaggtttcgaattttcaaagaacatatgcatggaaatataaac

SEQ ID NO: 792 - DNA, 287 bp; double-stranded, linear
cgagttttcgctggcgcgggccaccctgctgctggatcgcgacgccagatcggaggtcgaacagggcgtgcgcgatgcctgggacctggtcggcggttcgcgtgcgcaactggcagaacttcctggcctggcagttccactacgagcactacatcctggcgcgcctgttcgtgaaccgccgcaccgcgcgcgtgctggacttcggccatcgcgaattcggcgagaaccgcatcctgcccgacgaggaggcgcatcgcatccgcatcacgcagtgntggctgcgcaac

SEQ ID NO: 793 - DNA, 379 bp; double-stranded, linear
aataaaatggccataataacaaacgcaatgactaaatataaattactatctttcaaataatttttcatataatcctcttttcttggtttcaagttgccccgtgcctgccacggaaaattcttttttattatagtcggtttcgagggaaaaagaaacaacttctcttaggtcttatgatatactgaaaagaaaaaaatgaaagaaggattggatatgacctattctattacatgggatttagacagtattttccccaatgggagcgagtccaaagaacttagccaacgaatgactcaattaaccgaacagacaaaagagtaccatcaattaatcacagaatggacaccagaaagtgccccangcaangaacaatttgctg

SEQ ID NO: 794 - DNA, 906 bp; double-stranded, linear
ccaaaattatccgactacgccatagatcatttaagaaggataatttttggaagggaaagagaatcatatatgaagtgaaggaggtcaggacagaaccgtttattttcgaaggaattggttctgttctcgccatttatcaggttttgaacctggaacaaaaatccaaagtgatttttgtcccaggctctttcgctcttttattgagtaagaagtcagtttagaatttatattaagtttcgctgtacattttaaaattatcatcaacagaaaatacaacaggcgaatttttagataaaaaaattagtaaaacaagtattaaataaatagtatttttgaggataaagtaagagaaatgttgtttttttaatagttgttaacggaaaacaaaattattttatagccataaaatatatttttattataattatattataamaymmtgagcatatgatttgcagataagtttttcagggcctattctgaataggaacttagctataaaaataaaagaggagagtggttttgatgagaaaaaatcagaagattgtgccaattgtgacagcttcagacgaaaattatgctccttatttgaatgtaatgatgacaactgttttagaaaattgtcatgcggagagacctgttcatttttatgtgattgatgatgggctgtcgctatctagcaaaaaagcactccgagaaacggttagtagtaactcacaaaatgcaactgttgaatttctaacagcagacaaagaagtctatcaaaattttttagtgagtgatcatattacaacgaccgcatacttacgcatttctttaccgtcacttttacaaaaatatagctataaaaaggttctttatttagatgcagatacgctggttttagatgatattgtccagttgtat

SEQ ID NO: 795 - DNA, 232 bp; double-stranded, linear
gggcaagaagcatccaagtcttgattcgccgaggagcaagtcttgaagatgcacaagatgcagtgtcgcaaacgtatacaacgattttttcaatattacctgaaattacatcagaaaatctacgcccgtggtttttccgagtaacatttaattactacattacgatgtatcgaaaaaagaaacgagaacgcacttttgtggcaaacagccatcctgtgcaatcaatagaaaa

SEQ ID NO: 796 - DNA, 600 bp; double-stranded, linear
tttattacatatcaagattctatcacctttacaaagaatgttgcatcttggtatacagctgtatcttcggtattaccataaactttagcagctgtatgaacatcagtgattaatgtattttcgtatagttcttgkgctgcacttactccaccgctattatgcccatcgaatagacctttaatttctacttctactgtttcatctgcacctttctcattatcagcatcaaataaattagatttatttttatcttatctccaactttaaggttatttttttcagctaaatctttatgcattaagattttatttttatcttcattttctaaatgctttccttctactaatttatatgcttctgatacaaattttgtttcttttgttgagtcgttaaccccagttaacataactgttcttttaaaattctttgctctttcaggkgattgattcgcaagagtctcttgagtttcaataatatcataatcaactaaatctgcaacactgtttattctttttacataggagtctatactatctgtttgagatatctttttaatatcttcaccttttacatttcccccacctctaggtgttcctggat

SEQ ID NO: 797 - DNA, 636 bp; double-stranded, linear
ttttggaggacaagatgattcgtatactcgtactattactcgccgttgtcacaggcgtaccagttattatttgatgaagaaaagtgcagcttttttaccactcttaaaaaaagaaactgcaacagaaagtcaacagtttatcgaacgttttgggcgttattacttgattatcgccattctaggtgttctagcggctatttttaatcgcccgttattgtcaattggttttatcttttttgttttattactttcaacgttgtttagtttaacttttgcaaaaaaaatgtcataaaagacgatgaatttaaagaggtcgggacagaagtgtttaactccgagaaataagaaggaatttccgaaaattgttctttaatttttggagaatttcggcttatttccgaagagttgcttctgtttccgccgtttatcaatttttaacggtgggacaaaaatccaaagtgatttttgtcccaggttctttttttacmaaaaaaatgccaatattcagaaaaaaaagaagcggnttcagttccktttttcnttgnttgntttacnattatatngaamcattaatgattttgttacgctgaaaggagcggttattatgttacaacaatatcanaaaattatgatagc

SEQ ID NO: 798 - DNA, 658 bp; double-stranded, linear
tgggtaatttttaggtttcacttcgaaacgattattgacatactttcgtaaatacgcacctgtttgtagggaaagtgtttgttcctctttaaaagatagaagatttttgactgtaaaattaactagcatgctgttcactgagagatcccctcataatttccccaaagcgtaaccatgtgtgaataaattttgagctagtagggttgcagccacgagtaagtcttcccttgttattgtgtagccagaatgccgcaaaacttccatgcctaagcgaactgttgagagtacgtttcgatttctgactgtgttagcctggaagtgcttgtcccaaccttgtttctgagcatgaacgcccgcaagccaacatgttagttgaagcatcagggcgattagcagcatgatatcaaaacgctctgagctgctcgttcggctatggcgtaggcctagtccgtaggcaggacttttcaagtctcggaaggtttcttcaatctgcattcgcttcgaatagatattaacmagttgtttgggtgttcgaatttcaacaggtaagttagttgctagaayccatggctcctttgccgacgctgagtagantttaggtgacgggtggtgacmatgnaktccgtgtcgagcgctgatttttcggsctttagagcga

SEQ ID NO: 799 - DNA, 826 bp; double-stranded, linear
taaaattaatatttactaaattaagattcttcaataatttttttgcttcatctacagtagagcattggcccaatacccaaggaataaactcaaatggagaaacattttcttttccttcttcaatttttttataatctgcatagcctgaaaagtttaatccagccattcctaatcctttttcatttattgcatcataataaagcggataatcagcaatcccagcagcaattccaaytattgcaaaatgatgatctaaatttccaacttctcgaaatgaaaacttataatttctcggcgtaatagtaaccacctcattataagamatttcataatcaaaattccttccaaagtaatgatcttttgatacataagtaattgctgtacacataatcaattcctcctatatactaattcagtcactaaaatagtacacccaatactcttttttatcaaatttaacctatccacaaaatggctaaacaatatatgaacattcaatttggttctgttgcaaagttttaaatctactatcaaataaggtagaataatagaaaaagatagcaggaggaatgacggtgaatcattttaaaggaaagcaatttcagtaggatgtgattattgtagccgtgggctactatcttcgttataaccttagctatcgtgaagttcaagaaatcttatatgatcgtgggcattaacgttctcatacgacgatttatcgttgggtgcaagaatatggccaactactctatccaatttgggaaaaagaaaaataaacmatccttttawtccctgggaaatgggatgaacgkacctccaaattana

SEQ ID NO: 800 - DNA, 413 bp; double-stranded, linear
aaaccagattggtctgctctgactcaatctggacacaaaatcattatttatttaattagttttgttactttattgatttattggaacaatcatcatcatttatttcaaagtgtccgtaaaattgatggacgtgtcctttggatgaataattttctaattttgacgttgacgtttttcccgtttgttactggttgggtgggtgaacatccgttttcttggccgccacaagctttgtatggcttagtagtattmggmgmtgatgttgcttattatctagtggtgcgggcattgattcaggcaaatgggcccaaatccgaagtacaacgkttgttkggccactakccaaaattaacgctttcgattgtgttgaatattantgcgntgattgtgggtaaaatggtagcaccaatcgc

SEQ ID NO: 801 - DNA, 414 bp; double-stranded, linear
tcttcattcacatcaaatgcgcaacttacacgaatactgttgctttgatggaatttgtactttaataaagcacttcctaaattaccaaccccgattaatgcgacattggttaactcatcttcattcaatgtttttgcaaaaaagttcattaagttttcaacatcatagccgtacccacgtttacctaattcaccaaaatatgaaaagtcacgacgaatagtcgcactgtctacttgtaccgcttcacttaattcagttgatgagactttattttttcctgtatcatgtaacattcttaagtagcgataatataaaggaaggcgtcgcgccgttgcttttggaataacttgatctttcacaattggacctccaatactttcacttaaatcktatccattaacataatagcagttt

SEQ ID NO: 802 - DNA, 749 bp; double-stranded, linear
gccaatttttatagaaaaaaaacaaagaagaatagaatactggctaattgcttttntaggaattttatttttaacaacatttattaatcatacgtatgctttttcagagaacattaagttgatcatttggcaatgtatctttttcttttccgtttacgaagtagggcgttcgaatgataaatctgtttttaaagcttttgagtatgtacttttaattgtttggaccgcattagtcatcgttgggttatacttattttttgcgcgaatcagcttttcaaaaccagtagagtctttgtattacggaatgagaatcggtttttttgaaaatcgattatatggtgttttgtggagcctaactatgcatgtaccatctcattagkttgtattttggttggcgtgcggaattttattaataccaatagcaaatggttaaaagtggtttgtgcaatggtgatttttcyacaatttagttatgtagcattgtctggatcaagatcaggagttattcagttgatttcaatggtaattttcgggatgttctttacaatttggttctttcaaaaaaatacatccaaagcagttataaaaaaagttgtgcaagcagtattagtttcttttttctgtggtgctattgttttcgggggccttacagttaatagaaaaagggtatattgctactgcaaattcagtgaatatggaagtaccaaaagttttaggataataaaggaaaatggaattcnagggaaata

SEQ ID NO: 803 - DNA, 624 bp; double-stranded, linear
aaggcttcgtaggttgtatcaatcagcttggcaccagcatccacaatcatggtggtaccggctactttgatttctttcatttctgttagcataatcacgacatcgcgaataccgccatcacgaacaatcaagttgctagcattgcctaatactaaccatgaaagtccttgttctcggcaatacgccacaatctcttcaacttctttttttgttttgggtaaggccaacacatcagctgggccgcctgttttggtaaaggttacgttttttaatggttcatctactaataaagtaatttcgtttaatgtttctaacatagctttagtgttcacgaaagttagtcctttcttttcaaaatatctgtcttattctagcatgatagaaagaaagttgctagtcctctttaaagaacatgccgttgttgttggcgtacatttcttcacataacgcatgactttcatagactttttcttgctttaactcttgctcttgcggtttttgaatggcctgaatgaaagcagtaaccatttggtaaaaacctcttttttccaatgttggcgtccaatctcccatctcctttacctggtatcctcttccggttggagggcaaatgcgtaaattttc

SEQ ID NO: 804 - DNA, 570 bp; double-stranded, linear
tttttagtcatttactccctccttttcgagcagtacttaccttactgtagcatagtttttgattggcgcctatcagcaatttatctccagataatagaaaagccccccagcgaaagtgratggcttttctattgttaattctttctgatttgtagataacttacacctaaaacggcaaatgtacttgccagtattcctgctattagcataaacggtgtttttgttgtgcctgttttgggaagttctcgttgcccgtttgcttcatttaatttttgaattggttcactaagcagttggggagccaactgtgggcttccttcatttttcaatgtatttaatggagcgtttagtatttgtggttgattttttgatgtaacatttttatttttctccacagttgtttctgtggatggctgttttttctcagttgtagtaatttcttttgttggtgagacatgaacttctggctggctgctttctgccgttccgttataccattctcttcagtgtkacgcttggttntcaggtatgattggtgcaatcgtgcctagtgttcacttccatctggat

SEQ ID NO: 805 - DNA, 463 bp; double-stranded, linear
tgcattttgcctgggacaatccagacgaggacttgaccgggtatttccggcgctttctggaactgaccgccattaagagngaccgaaagcggcgcgtctacgtcctgaccaattacggcagcacccatgagcaggacttgtaccgggtggaaaccctgcgcggcatgrgrtatgacccctatgtgatggtctacgaccgcccggccgcaccgaaaatcacccgccagcttcagcgctgggtgaataataagcggattttttacacggtcaaaaactttgccgattacattccaaacagaacaggagggataacgtgaaaatcgaccgattaaaaaccgacctggcaaaagccagggaaaaagccgccgagtggcaggcccgcgtgcgggacttggagaagcagatcaccgagcaggaaaaccttgaaatcttgcaggtggtacgcagcgtanggctttcgccg

SEQ ID NO: 806 - DNA, 611 bp; double-stranded, linear
aagnattnccggacgccgagaaattaattttagaagatgcgggtgtaataccgttacttcaaattggaaatgctaaattaagaaatcaaaaaatttctgaaatgaaagtacactctattggtgctaagtatgattataaaaccatggagataaaataaaaaacctctcttaaaagaggtttttttatttgtcagattttaaatagccaacaccttcaaaagtatcagcaattatatttaaagaagagggaacttcaaaattttcttttctagctatttctgttacttctttaactaactctttataagtatcattttcacctaattgagagaataaatttacgatgtttacagctttcaaatattcctccatatttcgttttttcaagaaatttctgagatgttttaaataaatcatttctaaattaatagtaccatctaaaataaaagaagggacttttcgaacaatatcaaattgttcaaggaagtaatcagctttttcaaaatcctttttttcaagaaagacagtaaccgcattcttgatacataactgaactgcatggtcatggatatctccataagatttggttaattgggaaagagtttttcctg

SEQ ID NO: 807 - DNA, 552 bp; double-stranded, linear
aaatgaagataaatttactcattggacccctaatgtttatagttatggtgcatatgctgatgataatagaactattgttaaaggccacaacgaaagaaacttgcaacaaatcaatacttttgtaatcgattttgatcgctcactaggtgaaatattagattctcaaatgattctcgatgctgcaattgatctggaactgatgccaacgctaattttagaaactccagggggatttcaagcgtatttcattcttgaaaatgcctggtacatttcttcaaaaaataattatcaatcaatcgaagtggccaagagagtatctgaaaatttaagaaaagcatttgctgaagtattgccttcggtcgatttggggtgcaacattttggtattgcacgtattcctagaacagacaatgtagtctattactacccagcactgacacatgatatgcaacaactaatccagtggtccatgaaatttgaggccaaaaagaacacctnaaaaaaccggaatcttaatgttggttgcnggtaaagatggaatcnggatttaaag

SEQ ID NO: 808 - DNA, 1217 bp; double-stranded, linear
ggcagtagatattttaacatctgcaaaagtcaacgaaacttctaatatagtagaagcaaaaattgcggacgaacaagtaactggcaaattaaccgcaacaaaaaccgttaataacgccaaaccaaaactaggggaagaaatcgaatacaccatcagcttccgcaacactatcgaaaacggcatcctaaacaaagtagttatcacagaccaactgccaaaaggactgacatatgtcaaagatagcctaacaagtgttggtgatgaaccaaagccaaccagcttgaaagaaaccaacggcacaatcacagcggaatacccaagtatcaccgatatgaaagaacggagtattcgcttcaaagtgatcgttaacgaagaagccaaagcgggcgaaacaattctcaacaaagccaaagtagatgacacagttaatccaccagaagaaccagaggtgcctgtggtaccagaaacgaacgcaggcaaactagccgcaacaaaaaccgttaataacgcyaaaccaaaactaggcgaaactatcgagtacacaattagcttccgcaayaccatcgaaaacggcgtcctaaacaaagtagttatcacagaccaactaccaaaaggactgacgtatgtcaaagatagcctaacaagtgtcggtgatgaaccaaaaccaaccagcttgaaagaagccaacggcacaatcacagcggaatacccaagtatcaccgatacgaaagaacggagtattcgtttcaaagtgatcgttaacgatgaagcgaaagcgggcgaaacaattctcaacaaagccaaagtaggtgatggcatcaatccaccagaagaaccagaagtgcccattacgcctgaagaaccagcgaaaaataaaaaggaaacaaacaaagttgttacagaccagaacaaacctacaaaaaatagtaaaaatgaaattgccataaacaagaaagaaacgtctaaatcatcctatttaccaaaaacaggagaaaaagttcaaaaaatatttgcgtatctgggtgtaggactgatcttaattgtattaattctctatgttataaagagaaacaaagaaaaagaggagtaaacaaaatcgattgttttagaacgactaattagctgaaaatttangngttgacgacataagtcaaaatgacctatgtcgtcaactctttttggatttataacaaggaaatccaacatattgtgtgtgc

SEQ ID NO: 809 - DNA, 2405 bp; double-stranded, linear
gcggcgagcgaacggaagagcccaanccaacaagcttgcttgttggggttgtaggactccaatatggtagtctgttagtatagttgaaggatttggaaaattccgctaaagagggtgaaagccccgtagacgaaatgctgacaacacctaggaggatcctgagtacggcggaacacgagaaattccgtcggaatccgcggggaccatcccgcaaggctaaatactccctagtgaccgatagtgaaccagtaccgtgagggaaaggtgaaaagcaccccggaaggggagtgaaatagatcctgaaaccgtgtgcctacaacaagtcaaagctcgttaatgagtgatggcgtgccttttgtagaatgaaccggcgagttacgattgcatgcgaggttaagtcgaagagacggagccgcagcgaaagcgagtctgaatagggcgaatgagtatgtagtcgtagacccgaaaccatgtgatctacccatgtccaggttgaaggtgcggtaaaacgcactggaggaccgaacccacgtacgttgaaaagtgcggggatgaggtgtgggtagcggagaaattccaaacgaacttggagatagctggttctctccgaaatagctttagggctagcctcggaattgagaatgatggaggtagagcactgtttggactaggggcccatctcgggttaccgaattcagataaactccgaatgccattcatttatatccgggagtcagactgcgagtgataagatccgtagtcgaaagggaaacagcccagaccaccagctaaggtcccaaaatatatgttaagtggaaaaggatgtggggttgcacagacaactaggatgttggcttagaagcagccaccatttaaagagtgcgtaatagctcactagtcgagtgaccctgcgccgaaaatgtaccggggctaaacatattaccgaagctgtggactacaccattaggtgtagtggtaggagagcgttctaagggcgttgaaggtcgatcgtgaggacggctggagcgcttagaagtgagaatgccggtatgagtagcgaaagacaggtgagaatcctgtccaccgtatgactaaggtttcctggggaaggctcgtccgcccagggttagtcgggacctaagccgaggccgataggcgtaggcgatggacaacaggttgatattcctgtaccagttgtttttgtttgagcaatggagggacgcagtaggctaaggaatgcatgcgattggaagtgcatgtccaagcaatgagtcttgagtagagttaaatgctttactctttaaggacaagttgtgacggggagcgaaataatagtagcgaagttcctgatgtcacactgccaagaaaagcttctagtgagaaaacaactgcccgtaccgtaaaccgacacaggtagtcgaggagagtatcctaaggtgagcgagcgaactctcgttaaggaactcggcaaaatgaccccgtaacttcgggagaaggggtgctgacttcggtcagccgcagtgaataggcccaagcgactgtttatcaaaaacacaggtctctgcaaaatcgtaagatgaagtataggggctgacgcctgcccggtgctggaaggttaagaggatgggttagcttcggcgaagctcagaattgaagccccagtaaacggcggccgtaactataacggtcctaagstagcgaaattccttgtcgggtaagttccgacccgcacgaaaggcgtaacgatttgggcactgtctcaacgagagactcggtgaaattttagtacctgtgaagatgcaggttacccgcgacaggacggaaagaccccatggagctttactgtagtttgatattgagtgtttgtaccacatgtacaggataggtaggagccgatgagaccggaacgctagtttcggaggaggcgctggtgggatactacccttgtgttatgaaccctctaacccgcaccactaatcgtggtgggagacagtgtcagatgggcagtttgactggggcggtcgcctcctaaaaggtaacggaggcgcccaaaggttccctcagaatggttggaaatcattcgaagagtgtaaaggcagaagggagcttgactgcgagacctacaagtcgagcagggacgaaagtcggggcttagtgatccggtggttccgcatggaagggccatcgctcaacggataaaagctaccctggggataacaggcttatctcccccaagagtccacatcgacggggaggtttggcacctcgatgtcggctcgtcgcatcctggggctgtagtcggtcccaagggttgggctgttcgcccattaaagcggcacgmgagctgggttcagaacgtcgtgagacagttcggtccctatccgtcgcgggcgttggaaatttga

SEQ ID NO: 810 - DNA, 537 bp; double-stranded, linear
agaatatgctaaagtattaagaaagaatagtctggagttgataagaatgaactttaaagaaaaaattacagaaatggttgaaaatgtttacgatttagcacgcgatggtaagtatgatgtcaaagttgacttaattcctcgtaaaaaaggcaacatcaaaagtggtgttaaagtcacttcttcaagaaatacagcccacaatatcaaatggcgttcaaaaaactaaktcgtctttaacagaaacaccggagcagacaaaattattgtctactccggtgtttttatttttctaattcgatacctaagacagttaaatgcccattaccaactaatttgataactaattgggctaagtggttgggtgtcatatctgtttcgctngtggtccaccaatgaagggtaccgatgaagatagagggcatgtattcaatnacaaaatcntatcggnacatcaataatcattttcggtaatacgcaactgcggaaaaaaatcgtcgccatattttccttcganaatttcagctaagcgttttcgaa

SEQ ID NO: 811 - DNA, 799 bp; double-stranded, linear
gcttttacttttaaactgagcggtactataatttctgctgaatttgttaaactttctgcactagtaatttgtggggattgtagtgaaactaaagctgctgtagatagtagcaaaccgccaagaattatctttgatttcataatatcattctccttaaattctatttattaagctcaaaaaaatagtttttatcttaacattctagctactttaattcttaatactacaaaaggaaaacattgttatattgaataaaaacatgtccctatctcctttctaattagtttccacaaaacgtaatgattacgttttgtggaaactaattttacaaatttttttaagaatgtcaataaaaatgaaggttcattttatttaagtgtcaaaaatagattaatataaaatttaactcgattatttttcagatagctaaaaagcaatttcatctttattagctaaaaagtagtcaagtccagactcctgtgtaaaatgctatacaatgtttttaccatttctacttatcaaaattgatgtattttcttgaagaataaatccattcatcatgtaggtccataagaacggctccaattaagcgattggctgatgtttgattggggaagatgcgaataatcttttctcttctgcgtacttcttgattcagtcgttcaattagattggtactctttagtcgattgtgggaatttccttgtacggtatattgaaaggcgtcttcgaatccatcatccaatgatgcgcagcttttgaatatttgggtgatcgatataatcatgaatcaatcgat

SEQ ID NO: 812 - DNA, 480 bp; double-stranded, linear
tttgcaagttagtttacttttaggcttccttttaatctggattcattcatttatggaagatattttattagcgcctcattggatgccgatagtttatagtttccttgggctagccttctacttccggccagagaaaaaacgaggaagacatgaaagaccaacgacacctaaaagaagaaaacgagtgaaacaaacaagtcctgttagcaatgaagagcgcccgatagcacctgttgacgaagagggctgggaccaacctgaagaattaagtcgtgtccaaagacatcgcmgataattttcatcctatagaactttcttgtccgctgacattatggkratataggggttgcatgttattacaaataatgtaattactggaagtgaagagaggaagtttttaatgacatcaaaaagtgaatggagtaatgcaagacggattgtaattattttagcagacgttttgctctataatttatcaat

SEQ ID NO: 813 - DNA, 698 bp; double-stranded, linear
ttaagcgataaatcagctgaagtccttttagatttagatgctaagagcttcccaatgaacggcaaaacagttcgcgttgcccaagtaaataccgtcgatttagcagaagttttagatcgtcaagctgaattagaagcagctatggccgcagaaaatgcagccaataattatgacttgtttgtcttaattattacgaatatcctagacagtgattctgaattattagcgattggtgcggaacaagccaaaattgaagcagcgttcaatgtaacattagttaacaatcgtgcgttcttacccggcgttgtttctcgtaaaaaacaagtagtaccacaattaacagaagtctttaactaaaaccgtarggscctaagcaacgcgattaaattccttgttgcttaggcgcttcaatagtaaaggggcgttaacatgaatgatttagcaatttactatcattctccgcaacaaacgaaacaatacaatcatttgctcaaccaatcactttttttccctcttgttacttttatgtatgaacatcgggaagaaagaatcattttaagacaattaaaagcggcctttgcaacagaagccaagttagaacaatttttatcagaaaggattgattgtcagttaatcatngggaaaatcgtcaatatcgtttgaattttcctattatacggcagctgaagtgcgagttg

SEQ ID NO: 814 - DNA, 756 bp; double-stranded, linear
cttaatcgtttttcttttataggatatcgcantaatcgtaanacataattcatnngaaaggattaacccatgaccttaagaaaatcaagtttaattattttagtcccatacattacgctttcttcgggccgttacttttttcgggtatttcccccaatgcagcgattaatgtgacaactgctctctacattattggcgcccttgtaatgattggcatctttttaaaaacaacagaaccttctcctttagaggaaacagcaaccttgaaatcacctatttttatttttttactaggtgttagtgggattttcattgccatgctgattcaaggggttacttttgccattgaagtagccatcacaggagaacaagctacttctcaaaatacacaagctattgtagcggtgattttggcaaatcctttatttattttggcaactactatcggtggtccgattatggaaraawtcgtctttcgttatgcatttatccatttaatccasccttttacaaatttcyggawtgcggstactgttanttcggcgattttttcactcgcacatgccgatggtcacttttttgtttatttctttatgggatttttctttgctcttttgtacaagcaaactggaaaaatttggactcaattattgcccattgcggcatgaatacgattgtgattattgttcaactacttttgcataatggtacaattcaataagaaaagggcctntcgtctaaacgactaggcccttg

SEQ ID NO: 815 - DNA, 1602 bp; double-stranded, linear
gatacgctgcaagcgacrgtttcaagtgccygcgttttctggttgttccaagtcgttaaaccttggacttctgctaacgttaacgaaggctttgcttgaggtcgactaaaaattaagtccatgacatataaaagttcttttcgtcgggcaacgatttgtatctcatccgttggcagttttagcatttgccattgctcaaaaatatcatttgcggcttgggcaacttctgacgcattcggtccctctaggcgaaatgtctcaactggccaattcaccattcctgcgttgattaaaggatagttagctaactcaacatattctgaaatgctcgcttcggctaatggaaattgttgcaaacccgtttgataatagacatgctcattttgttcaaagtcagcatcaatcccagcaaaataatgaggaaagacctcaacaattttcaacaattgctgaaaagtcttaattgaacgtttcgctgactgatgtttttcaaacgcaatcacaccttgttgctgatattgtgcctgttttacaaaggaaaacccccagctttcgccatctaagttcattcgaatcactcgatggttcgtagtcgcaggaaattgctgacttccctggtagccttctgttgccatgcaccattcacagcggggatagctttgtgcagagagcgttgcttttgacgcctcactgtggaccttatttgctaaaaaatctccatagactgttgaaaaaacaacaggttcttcctgttcaatgaccgtaccgtttttttgacaaagttggtaaaaatactcggtagcctcttgtggctctttggcataatgttgtgcaaaaaaagcattaaccacagaaggtggcggtgttaacaaatccatcaattgcaccatgaactgttctttttgttgctctgtttttacaagttggttggcactcgcaacttgacacaattgttccgccaaatcagcggcgggtgttgccacaggccgtatgtctacttcgcctaattcttgttcaccaatcattgataataaacggttctgaagatataagcgatccaattccatccaaccacctgcttgaatagcaagtgtggtaaaatcggcaatcatttgactcgtggtcatcgattcattcctcctattacttttcttgatatccatgtggatgagcttgatgccattgccaagcggtggcgataatatccttgacctcagttacttctggttgccagcctaaaactcgtttggctttttcactagaagcaattaacgtactaggatcccctgctcggcgtggggcgattgttgcaggaatttcttggcctgtcacttcgcgagcagcatctaacatttctttaacagaatagccgttgttgctacccaggttaaagacgtcactttcgccaccatttttcaagtattctaaagccaaaatatgtgctgcaatcaagtcttcaatgtaaacataatctcgaatgcacgtgccatctggtgtatcataatcatccccaaaaatacttagctctgctcgttggcctaatgccacttgtaaaataattggcacaatatgcgtntctggcgtgtgatcctcaccaattga

SEQ ID NO: 816 - DNA, 1008 bp; double-stranded, linear
atttcctttggcgtggcttctctcgtcatttcaaaaatagatgcattcttttttatctgcacagacattacaacacgcattgaaacagttgagtgcttcggatgtggatattcatgtgttaacgatacctaccaatagcttttcatgttctctctcctaattgtttttatgtatatttgtttattgtaagacaaacactttaatccctgttatactcattgaaagacagcaactcctttttgcttcatgtaacacttccagttatttcaaaacataatctgctgtctggccactagatattttatctggtggtttttcatgcgaaaacaatccaaatatccgacaaaacttgacagctatgtkacacttgttttaggkagcactctktcataatagckaaagttcataaactacaagtgacacgagattttcactaacgctacctagccactagatcccatttctagtggctttttttgcacaaaaaataagttttgatgtgaataaacgctcttttattctttattcttatttgatataattttttaggtagcaactcctttttgtaaatagcaaccaacaaaaattttgcacgaatgctacctagccactagatcccatagtctagtggttttttatgtacgaraaaargmccacttactgagtgancttwataycgmcgtgscaggagtkgatctgcagccatkgattaaaaawtamckgtycttatttattaakgamcctttycttttttggttcagwttcaaaaactatttctaamctcaaawtawtagtctgtaaagacmacgccataamcagccctgagaaaaatgtccatatataaaatattaggattgaagcaaaggtctctttatactgaaatatttggagcatcattgatagtatcaaagtagtaaatgcacttaataaagatataaagagttgatattttaatttttttctatagcagatcctcgtatattcttcataaaactagtatcttttata

SEQ ID NO: 817 - DNA, 645 bp; double-stranded, linear
gtcatagctgtttcctgtgtgaaattgttatccgctcacaattccacacaacatacgagccggaagcataaagtgtaaagcctggggtgcctaatgagtgagctaactcacattaattgcgttgcgctcactgcccgctttccagtcgggaaacctgtcgtgccagctgcattaatgaatcggccaacgcgcggggagaggcggtttgcgtattgggcgctcttccgcttcctcgctcactgactcgcngcgctcggtcgttcggctgcggcgagcggtatcagctcactcaaaggcggtaatacggttatccacagaatcaggggataacgcaggaaagaacatgtgagcaaaaggccagcaaaaggccaggaaccgtaaaaaggccgcgttgctggcgtttttccataggctccgcccccctgacgagcatcacaaaaatcgacgctcaagtcagaggtggcgaaacccgacaggactataaagataccaggcgtttccccctggaagctccctcgtgcgctctcctgttccgaccctgccgcttaccggatacctgtccgcctttctcccttcgggaagcgtggcgctttctcatagctcacgctgtaggnntctcagttcggtgtaggtcgttngctccaa

SEQ ID NO: 818 - DNA, 687 bp; double-stranded, linear
atgcaagccagtggattaaaatatactaaaaaacgagaattactgatgagctatttgattaagcgaaatcngtatgtttctgcacgtgaagtgtatgaatttatgaatgaaacctttaaaggagtcagttatgatacggtttatcgtaacttgcatgactttgagcgcttagaattactggaaaaaacagaattaaatggcgagcaaaagtttcgcttccgttgttgccaagaggtggaacatcatcatcactttatttgtacggtttgtggcaaaacggaagaaattcacatgtgtccgatgaatttttttgaagaacagttaaaaggttgttcaattgaaggacatcgctttgaaatccttggtcgttgtgccgattgttgcgaaaaatagcgaataagacgaaaaatcaaacaaaaatttcgtattttatcagtagagtggttgacggttatttatgctttactataatataacaaggacagtattttaatttgtgggtttttcccacaaataagaaaaacggttactttttaagctcggaggggagggaataacatgtccaaaaacagtcgttcgtaaaaacgaatcncctggatganggctcttcgtcgcttcaaacgttccgtttccaaagcngggtacttttaccaagaatccacgtaaacgggaatttccacgaaaaac

SEQ ID NO: 819 - DNA, 370 bp; double-stranded, linear
tngtangcgttctttttttaagaataccaaaacattatttaaaataaagcaatttttatttttagtagtaagatagtaaagtagtaagatagtaaagtagtaagatagtaaagtagtaaaatagtagaatagtaaagtagtagaatagtaaaatagtaagatagtaaaaaatgtttattttttaataaatacgtctaaaaatccttttgtagaaaggttaatatcattcttttaaaacaataagatagtaaaatagtaagatagtaaagtagtaagatagtaaaatagtaaagtagtagaatagtaaagtagtaggatagtaagatagtaaaatagtaaattttataaatatnatttgtagtaaganaat

SEQ ID NO: 820 - DNA, 334 bp; double-stranded, linear
aaagtaaaaattggcttaaatatgttgttaatgattatcgttttaggcgtaatcttttatgtcatggataattcattaagtgatatttttgctcaactgatggaaacgagttggctggtgctgattgctgttattttttttggagtagtttatcaatttgcagaagggcgctcaatcaaggaaatagctcgttattttaacaaagactttacgacagtggatggtttttttacttcttgttatgtagcatttatcggattaattcattggcacggggaaccttgcctttcagaaatttaatttttaataggaaaaaggggaattcccggtttcc

SEQ ID NO: 821 - DNA, 493 bp; double-stranded, linear
cttcagactcacacccattctacactggtcgtcaaaaattnttgacaagccgacggacgtgtggaccgtttcaacaaaaaatacggtctcaaagacgaaaacgcaaatccagacgcatagtctttcaaaacattgttatgacaaggtttatagaggttttccactgtggtgggaaacctctttttttgttggataggcagttttaaattcagagaaattatttaaatattattttatttaactgaaatatagctagtccgtataccgtataatttaaattatttggatagtatacatatkgtaaagtgcaattgtctttttagaatctttaaggtataatttgttttaatgagtttatatgtaagctttttctctttaaagmctttgaycataycttttttataagagaaactatgtttgtgaaaaggatataaaagtgntaaaacaattgtacttaacagtattaagatgggagaccgtacaaggcataaaa

SEQ ID NO: 822 - DNA, 493 bp; double-stranded, linear
tttcaattccctcttcatatatcgaaataagataactataaccttccaataaataattaatttgttcatcaatagttttattccaagaacctttctcttcttttaatttagaatttataaaaaactcttctagagttgaatacggagatccgtcaagcgtaatcagtcgttctgaaattacatccaactgatcattaatttgctccataagatcatccatttttggatgtagcgttagaaatcttcctccacgcatataccaatgaacttgatgaattcttactgaaaatacgcttaaatcggctaccaattgatttaatatttttkttgtttcacaaaatttcatagtatcactcctaatttagtgttatttaaaaagaaatcattccgatttacgtacaatttaatataataaatatatcttgtcaaaaataaaatgaacgtttatattaaaaaagtgtttataaaaatctttacaacttattcatccttt

SEQ ID NO: 823 - DNA, 272 bp; double-stranded, linear
tagaacggaactaacagaatcatgcagattgcaacntttggtctgattaatgagatggaatcagtgaaaaaataatgaattttgttatctcaaagcttcgattcttcaagtattattgagatatatttaaaagctcgtagatttatctataaacgtttcttcacagtaccatcaaaatcgggaaaccgggtggcgacggtgaataatgtgccaatcggagataggcatcggatagtatcaaattcactacgcatgatgcgtagcaattacat

SEQ ID NO: 824 - DNA, 252 bp; double-stranded, linear
cgcggcctacgagaacacgaggttttcntgaactatcntcatgttgactcaatacataaccaccgtaacgccctaatttaaaagctaattcaggtgttaactccttatttgcaattcctcttacaccatctgttccaaaatatttacccattttgattctccttagtcacttgattctctgtattttcagttgaaccagcagttgtactttctactgttgatccctcacttgttgtttcagaagtatttgat

SEQ ID NO: 825 - DNA, 476 bp; double-stranded, linear
gacatctaaggtgccttcagcttttgaataaaaggcattattcggngatcgtaaccccattttgttactatcagttttataaatggtataaggtcctttgccttttaaggataagtgaagttcttcgcctgcttgtttattttttagtgtataactttcttttagcggtgtgactgatttttccgcttgcttgtaataatagacggcgccagatccaccaattgcccagcaaaaaattcttgtttggcttttggtaaaaacaatgtgatagataagaggatttgttctttaaagattgaccaatctgcgaatatttcttcattggttaaaatcatttctattttttctgctatttttttccagaggatcattcgccagttattttcacccacttccatattctttaaaccatgcttaataactgragrataatggggaacatttggckgacatcgcsgcaaatnaaaaatccatta

SEQ ID NO: 826 - DNA, 413 bp; double-stranded, linear
ttaatgacatgtgacaattgaataatttgtgggtcggttaattctttggaatcacgaacacctaatgattttagtttgctaatcatgcttttgtcaacataggncagcacagacagttactggaccaaaatagctaccaktaccgrcttcatcggaacctatcacagaccagttgccaaaatcagcaggcagtgtagtagtctggggagaaacttttttctttggtgtggtactcgttccttcccaacgagcggcctctttttcagcttgargtccctgaaacatgactttacctgattgataagcggtgatagtagtggtgccaaccttggccacaaagacagtataagggaccgttttatttaaacgatgggttgtaaacagtggtcatcctgctaatgnttntactaact

SEQ ID NO: 827 - DNA, 207 bp; double-stranded, linear
ttaaaagatacaatgtaatgsagacaggcacattaaaaccgacaatttttgttgagagggttgttaaaatttgtgccaagcctgttaagccactggaataaatatttcctggttgatagaaaaagttcatggcattgatgcaagaatagcatagacaatcgacacagaaaattttgttgtatagtcatgaactggcagtccgtcata

SEQ ID NO: 828 - DNA, 325 bp; double-stranded, linear
aacgtttggctaaatcacctagaattgaatcaggcacatccatccattgtgtaaagtacgtagagaggacgccatcatccaatttnangggggcttataangtgaagtcccctttaaagaatggtacaagcagagaggcttgtaaatcatagtcaaattcagggttttcaaataattctttcgcccgatgcaataaatgatcaagaatcacttccatcccacgagaaacagggtgaaaatagacttggacatacatttggtaacgactaacgatatagtcttccaccgcatgcatcccattcatagcaaaggcaatgcctccttt

SEQ ID NO: 829 - DNA, 957 bp; double-stranded, linear
ttgacggttntttaagtctttacttcgtanttacaacttcttccattaacttatnatttcctcgctattcctatcgttgtctaacaataagttgattcgatcatattctttgtctttatacttcactgttttcttacggattttattaacatcacttgttcctagttctgagcaagtaaggttccntacacattggtgtaaaaaacacgtgaagccaattaaatttcctgcactttttgctcgttgatctgcagataatttttgctctacttcatttccgttcttatctttccctttctctgtcattggtacactaacatcacctaagaccggattaatatttacaaatgcggtctcaacttctttatctacactaaacatcatatcaaacaaagaattggacgtgttggcatcttttaggacggaaagacccgtaaaaataagaatcgtcattaaaaaaataccaaaaaaccgtttgtatcgttgttgtccaataaatttacacctaaaataacaaagacaaaggcaatnccaatcgttcccgcaatgcccaacatgttagttgctatgctagacgttaggttcataatcggttgcttaatagcagttataatatccatactaaatagtgtttttaccataactgcattaaactctccgagtccttttaccattgaccagacaaaagtctttattgtcgcagaagcatttgtgatggcttcttcaacncctgtccatgaatcttgttttttttctttggtcattaactcgaaagcgttgtctttgtaagtatcgtaaatcaaatctacattagtggttggctctgtaacaataactttattttcatcaggtttaggttcggcattaaccgctgtaagtttggcgtaaacaccaaaaaaaaccnggcctactaaaaaatngtaaggactggcttttaccccgtggatttcttaattc

SEQ ID NO: 830 - DNA, 261 bp; double-stranded, linear
ggattttnactccaaaaaaagtttagcatccgcttacattgttgccaagaaaaatggagaattttggagttttttaattyttatagtgtataataaacaaaaattacattctagaggagattttatgaattacatttatttaattaatgaacattatcccttattaacaaaatcggaacgaaaagttgctgattttattcttaactctggagaatctattatttacagtactatgaatganattaaaanaaaagcgaatgt

SEQ ID NO: 831 - DNA, 451 bp; double-stranded, linear
attgctattaaaccaaatgggaacactatatattctccagtagatggtattgtccaagtcgtatttgaaactgggcacgcttatgacctcaaatcaaatactggtgctgaaatattaattcatgttggtattgacacagtatcattgaatggtaaaggattcactaaaaaagttggtgctaaacaaaaagtaaaaaagggagaggttcttggaacatttgacagcacagtaattacaaattcaggacttgatgatacaacaatggttattgtaacaaactctaaagattattcagaagttattcctataactaaaaatatagttactgaaggtgcagccttattgasrattaaatagcttattaaaagttaatagactctctatacmaagagagtctatatttttattatagttaattataactattctaagctaattaatttgacataaa

SEQ ID NO: 832 - DNA, 612 bp; double-stranded, linear
ccctttatgccctntccgnctgtaatgttgtccggttgtggaaccngtatggaaaagrtattgactgccgtggtggtaaatgggaactagaaaataaaagtccaactactacttacactttttttgatgatgaaactttttcgaggtataattcaaaaattagtgatagtggaacgtactcttacgatgaaaataataaaaaactcactttggatataaaaaataaagaacaattaataatggaaaatgttgaatataaagacggtaaattaaaaggtgaaattggaggcgtagaaggaactctgataaaaaaataaaataaagaggtgatcttttgaataagaaatcactggtaaaagcagtcttactatttttagtaggctgtttttttgtgtttacgcaaactacagcggttaatgccgaacctaaacctgatgaaaataaagttattgttacagagccaaccactaatgtagatttgatttacgatacttacaaagacaacgctttcgagttaatgaccaaagaraaaaaacaagattcatggacagggttgaagaagccatcacaaatgcttctgcgacaataaagacttttgtctggtcaatggta

SEQ ID NO: 833 - DNA, 995 bp; double-stranded, linear
cacttacggcaaaactttgaatcgaccgtgtcaattttttcacgaatatcttccaatgaatctttgaggcctaaccaccggataatacctctttcctgccaaatctccgcttcacgtttattacacatcgattgtgaacgtcgataaatcggcttctctaacgatgaaagacttcctaataatctcaagcaatcgttctgagatagtgtttcgcttaatacaattgcatcaaaataattaaaaaaagttaactcatgttctatagtttcttcacagcagttcgtacaaaagacttcataatttaaatgttgtaattgctgctgaaatgtttgctcaactaaaatgttctttgttaataccaaaatcctkckcatttcttctttcctcctagaactctttctgctaccaataactaaacgcaccaatcaaaatacgttaccaaatcgcgtgttttctccatcgattggttaataaacacctttttatcttcatctctcttcgctcctttattctttattttggtggttatttatatnatatnagaaatggattttgtttgkgtgtaaaatttttttatccccgtaaaaaaaaatgaattycctttaatatcaactaataaagckgatttttaacaaaaaagtgccgaaacttcctactttttgctaaaacacgccaaaantctgtaattttattatttttttctcgagaaaacatcaaaatgttgatgtttaacactaacattttgatgttttcgacaaaaatctttacaattaatcggtaattttctctacttttaacgataactacttttaaaaaagagttattttaaaagtgacttaaatatttatcatataaaaagtaagggactaaaatctttacgattctagtcccttactttttataatccacaacgtttttagttagaagaattcttttttgctttcctagcagaacgatctttttgacgacgttcaattttacgttttttcttattg

SEQ ID NO: 834 - DNA, 753 bp; double-stranded, linear
cgttggggtagcgaaattggttcttggttagttcaagggagtagacaccttacggatatggggttatggacgcatattctttctggattcattgtatcagtaacagggattatcattgtttactcttttcataagaagctatctcttttagctttaacagcagccatgttggttggctttaatccttggtttttacaaaatttaagtttcaggttcgacagtccttacatgtctttgagccttttattttctgttcttccatttctattttggaataaaaataaagtcttatttttagttgtttctattttaagcatttttttgatgtgtaatacttatcaggcgtcttcggggatctatgtcgtgatggtgttagcattatcactgaagcagctgttagacaatcaatcgtttattgctgtgcttaaaaaagcgattgtagctatgattagctatataagcgccatgtttcttnatcttattgaaacaaaatttaatcctgaaatagcaacgcgaggcggtatgncaacaatcgcgagtgttaaggatatacccaaaacaatcctggtaaatagtcaaatgtatctgtcaaaaataactgaacagagtacaaaactatggatacttttgttttttattctagtaattttctttgttttaagtacggttcttaatgcgaaagtatcgcctgttaaaagctttttatacgcagtattatttctatttttaggctctattttgagttanggcgtc

SEQ ID NO: 835 - DNA, 1076 bp; double-stranded, linear
tgagcgtggagcaaaaatccaaagtgatttttgtcccacgctcttgtttattacggaaaaaccatcaattttttattaaattctgatatttattattgctttttcattatagttggcgtaactttagagtataaatttgtgaagcgagggagtccgtgtgagaaattttaaaaaatccgataaattaaataacgtaagttacgatgtccgtggtcctgttttagaagaagcagaacgcatgcaagaagagggcatacgtattttgaaattaaatacagggaatccagcgccatttggttttgatgccccmaatgaaawtgtgcgcgacatgattgtaaatgttcgcgatycagaaggttattccgatycaaaaggtattttttctgcaagaaaagcgattgamcaatattgccaattaaaaaaatttccyaatgkaacgattaatgawatttacackggtaatggcgtgagtgaactaattaccatgtgtatgcaaggcttgttaaataacggcgatgaagtacttgtgccaatgccagactatcctttatggactgcatctgtttctttggcgggcggtacacccgttcattatatttgtgatgagcmagcagaatggtatccagacattgrtgatataaaatcmaaaataactycgaatacaaaagcaatcgttattatcaatcccaataatccgactggtgctttatatccgaaagagttattactagaaattgtcgaagtggcacgtcaaaatgatttaattatttactccgatgaaatttatgatcgcttggtcatggacggtttggtksatgtaccgattgctacattagctcctgatttawttgtcgtaacattgaatggtttgtcaaaatcacatcgagtggcaggcttccgatgcggttggatggtgktaagtggagataaatcacgagtaaaagggtatatcgaagggctaaatatgcytgcttccatgcggttatgctcaaatgtgttgtcacamcaaatcatycaamckgcattaggtggctatcaaagtgtcgatggtttacttttgccaggtggcagaattt

SEQ ID NO: 836 - DNA, 501 bp; double-stranded, linear
agacagcttaaaggtgagcaaatggnggttgttacgcatgttantgatggccagcatcaatttaaaatcaatgattttatcgattttacaggcaacaatcatacatcaaaagatagcatgattgggatgctagtaggcatattaggtggtcctctgggcattctttttggctggtttgctggaagtatgtatggtgcaagcaaagacgccaaagaaattcaagaagcacaaacggtttttgaacatgtgattcaaaagattgatgaaggacaaacgggattgttattaattgcagaagaagaagacaaccgtccgctcaaccaattggttatgtttgacttaggtggcgaaatcacgcggcttgatttagaggaagtccaccaagaatttacgatgcgaacgaattgcccaatggaagcggaaccatccgtgggcagcccaaaaaaaggnccacccccnaggaagccaccttccggaaagnaggattaagggngccaagac

SEQ ID NO: 837 - DNA, 856 bp; double-stranded, linear
aggttcattggttgtttcagggcttactactggttgttcttgtgctngatttttcactcctactgttggttgttggacgtttgtggtatcatttggggtagctgaactctgttactcmatttttttcrgacgctacttcttctgctttggtcggttgagaagtagtgtctttttgtactgcagattcttcagatactgccgtattaggcgttgcactacctaactgcggatcggggttatcggggtgcactgtcgttgatcctggttgcgtatctaattccgctgcttgtacattatcagtagctaatcctacaactcctaacacgcctagaaaaagaataggagctacgatccaatgcttctttgccttatacattttaaaacgtttttttacttcagtctgttgattcatgtatcattctcctcgattttttatttttttgtttgtaaaataactcacgcaacacaaggcgctcgttgctttttcattgtcatttccctccttactaaaaaaagagaaccgaaagtatcttcgattctcttagttattttatattcttataaaacacgatatatatctttgttttgctatatcaaacaattattaactattttttttacgttttttgttcttgaaattgatcgtacctgctgccatcaataatccaataatagtcaaccaaatactttgttgttctcccgtttgtggtaaggattctggtgcttttgctacttgtttcgtcttacgaggttctgaatgtgttaatgcttgtgcttttggttgttctttttgtttagaaaaagataactgttggagaccaggtgttttgtctgctgaagtagcacttgctactaa

SEQ ID NO: 838 - DNA, 261 bp; double-stranded, linear
tgtgcctcttgggatttcgctgtgccattttttactttcaaacccaggtgtgccaccgtgaagtgttgtttgagtaggagtattaatcatcgtttgatactttttacccgctagttcaaaggagccatcggcaattcggccagctggttcgaccaattgttgcaccaaaatataagtctttagacaaatattcatcttgctgaggggaaagcctagcacgagtgatcgggatcatttntgtaagggaacgtcggcgcaaca

SEQ ID NO: 839 - DNA, 477 bp; double-stranded, linear
atatagctaaaaatgatatacctgatgcagatattattatgtacaatgagatggatatggcatatcttgatgaaaaaatcaagaatactggattgcctgtatcatatatagatttacaaacaaaaaatgctgatagtataaagaaaaaattagaaaaatttgctgaaaataaaatacaataataactactataaagttactgatgaaaagagccaacagggtataccctgttggtctttttgtatgttcatgatatacttgaatttctaagaggkcaacagagttgagcamcagaattttaaaataaagtaattttttrgaggrgattttctatggcaaaaattggatatgcncgagtaagagtgggatcaaaatttagatcgacagttagaattattatcncagtgtgataaaatttttactgtaagcaagtgggaggaactaancgnatggttccagaaatgtgaatttatcggg

SEQ ID NO: 840 - DNA, 354 bp; double-stranded, linear
gcaacaagttcgctatattcaacaattattggaatatacggcagaaacatttgcagagaataatgatggacaagaaattatgaatcgaattaagaccgtttatgaaacctatcgcacaaaaccattgccgcaaacaagargtgaatttgaaaatcgggcgcgactctttcagtttttacaattgtttcagtcattcattcaagtcaaagcggactttgccaaattacaactagataaataaacagaaaaagaaacctttttaaacagaggtttcttttttgtnctcttaaaaattcaggcaagttctttagtattcattgagaatgtgttaaactaatgagaaagaaanntaac

SEQ ID NO: 841 - DNA, 458 bp; double-stranded, linear
aagccagaaatatgttgtaaaagttgagcactcgctgtattcacatcaacaccaacttggtttaccgcagtttctacaacaaaatccaattgctcggcaagacgtttttgcgatacgtcatgctgatattgaccgaccccgactgctttgggatcaatttttactaattctgccaacggatcttgcaaacgacgtgcaatgctgaccgcacttcgttcttcgacttgtaaatcaggaaactctttacgagccacttcactcgcagagtaaacggaagcccctgcttcattaacaatcacgtaaaagacgtcacgcttcaccgcttttaattgctctgccacaaacaattcagattcacgacttgccgttccgtttccaatagctaccatgtccacttgatagtcttcartgatctttttaaaggctggaccagnggcttcacgtttcgcagcagtcgc

SEQ ID NO: 842 - DNA, 1482 bp; double-stranded, linear
atttgkcgtactttttcttcataatttgtcgtacttttagtcgcaactgcttgaagactagccaatgtcgctttatgaacagatagttctttttctgctgttgcttgtgttgttttggctgtatttaagacttgctgacttgcactttttgcttgttgagcgtctgattctgcttgttgtgcagtagctaatttttcttgattggttgctacttctttttgaagggtttctttactcttaaagactggagcagtgccttcttcataggtatttgcttcaactaattttgattgattatagctaatgatatggatttttgccgaaatatcatttaaatctcctgaaatagaaactgccatgtttgttgtgtccccttttagcaatgaatctatatgagaatacgctgaactttcatcgtcaaagagcatatcagcaattgtttttcgagcagctttttcaaactctagttgagaaatagtgccattaatcgtttcaaaatagcccatacttagattttcataaaagttttgccctggatactctttaaaaccattttcttttgctgcacgattaattgcatttacgtcatgatcaaactctttgggattatcatattttgctacatcccaagcaaatctcatagcttggttagaaatcttcaacttttgtaacccaagcttttcgcgaacatcattgataagtcctacaacgtaatcgctcatttgttgcttttgttttycggtaggatttttgacattgatcatttccgttrcttttgccrcatctgcttgattttcaggaaaaactttatttaatgctaatgcttctttttccattgcttgcttttcttgttcagwtaattttttgtaataatcaggtgtgaagttagcaggyaagttaaktcctttatgyccytttarctcttcttttgakytatctaaagtattctgcgcttgctttgttgctgcttgcttgtctttyaaagcattttctttygmagttaaatctgcctgtttcgcagctgtatctgcttttgcgtctgctactttctcttgactagttgtcacaacrgtttgttggtctgcractgcttgatcgtccttcgtyttttgatctttagctttkgcttcttctttctgtttgttagccagttcagcttcttttgctgcttgttctttttctgcctttactttttccgcttccgcatttytcgctaattcttcaagcttggcttgttcttgttttgcagctgttactgcttgttgatctttttcattttgcactttagcagcattcgtttcttttgctttttcatcgacaacagcttgttgttggttaacgtctgtttgagcttgatccactactttttgttgttcatcaacagcctgtgtatccgtagccacttgctctttagctttttcaatggctgaaggtgttgcttcatccacgacttttttagcttcgtctacaactgcttgttgg

SEQ ID NO: 843 - DNA, 315 bp; double-stranded, linear
ggaatcatggctaaaaatgaccctaaataagggattaaatttaaaaagcctgctgcaatacctaaagtgactgcataatctaagccaatgacagaaaaaccaatcataaacataattgccactgcgaaagcgacagttaattgtcctctaatataagaagagacttgatcattgacttctgcagaacttttaggttggtttacgcatcttcactggtaaaaacttcattaaattggcgctagtttttgccatctttcagtaaataaaatagaataacggcatcgtaatgatggcgacaaagatcgtagccaccgc

SEQ ID NO: 844 - DNA, 232 bp; double-stranded, linear
ttttattctattaaccaatccggcgcattggaatatcattgttatctggatgaaccaataaatattgaataacatcaatattgcktgcttggaatgaggctgcacatgcttgcaaatataagtcccacattcgatagaagcgctcgcctttttcgtcaacaatttctgcntctatattatggaagttttttgtccaatgttccaacgtcaattganaatctctgcgcaaact

SEQ ID NO: 845 - DNA, 897 bp; double-stranded, linear
tcgctgcatttacatctggatatgggcccaanatataacgctttgtcttttaaaacctttcgagtaatcattaaacgaggatatttttcgtttgtgattttgataaaaggataggttttatcgtcttttaacatgatgtnatatttgggattatttttatggattaaattaatttctaataaaagtgcttcaatattcgattctgtcacaatatattcaaaatcatcgatttcactgactaatcgttctgtcttagtatcatggctaccacgaaaataagatcggacacggtttttcaaaattttggctttcccaacatagataatcgtgccgtttttatctttcattaaataacaaccaggttgatcaggaagcagtgctaatttattttktattcgttcgttcatacgatacttcctttctaacaaaatgcttcgtctattatacacctctttttgtaattaaacaaaaaaagccgctactttatgtacgaaagaaacagcctgaaaagacaatcgctaatgatttcctcttcagactgaatcaaactattcgtaatgactaatcacgtttataagtgtttggcaatcattgcttgcaattggtcttttgtatgaacaccgactgctttttcaacaacttcgccatcttttttcaatagcaatgttgggatgctcatgattccaaaacttgctggtgttgcaggattttcatccacatccattttgacgattttcacttcgtcttcatcatattcttcagataattgttctaagatgggtgcttgcatacggcaagggccacaccaagttgcccaaaagtcgattaagactaatccttcatctgtttctgttgcaaaatctttatcggtaattgcttgtgtcatttcacgggatc

SEQ ID NO: 846 - DNA, 740 bp; double-stranded, linear
tcgaactgccgacacacggagcttcaatccgttgctctaccaactgagctaccacgcctaaaacaaaagcttgttcaaataattttcaagtaacaacattaaatggcggttccgacgggatttgaacccgcgatctcctgcgtgacaggcaggcatgttaacccctacaccacggaaccaaccgagtaatggaggttaacgggatcgaaccgctgaccccctgcttgtaaggcaggtgctctcccagctgagctaaacctccaaaaaggaatgttactattaaaataaatgacccgtacgggactcgaacccgtgttaccgccgtgaaagggcggtgtcttaaccgcttgaccaacgggccagtttgtaaatatgaaacggagagtaagggattcgaacccttgagacagtgtttaccgcctacatgatttccaatcatgctccttcggcctctcggacaactctccatagctgaaagaagcacatactcatgatatttcatatgttaaactccggcagtaggactcgaacctacgacatcatgattaacagtcatgcgctactaccaactgagctatgccggaataawygcgtggcgacgtcctactctcacaaagggaaacccttcactacaatcggcgctaagaagcttaacttctgtgttcgncatgggaacaggtgtatccttctcgtatcgccaccacactgggtgttgtntcttattgagttgaatcttcatt

SEQ ID NO: 847 - DNA, 615 bp; double-stranded, linear
cattaatacaggtattaatctctataatgatggtcaactagacgatgcgcctgtagctggggaatatagtaagcaattagaaaatnacaaagatttcatacgagaattatctgctacaactatgtttttagaggtaaatcaacgaaataaaaaaagtataacttcaaataaacatgctcgacaagcgattaattttgcgattgatcgtgaggctatatcaaacaagatattaacaaatggaagtataccagctaaaggtgtagtaccgagtaaactagtatataatccaaaaacaggaaaagattttactaattcaagtttagtgtttttggataagagtaaagctaaagacagctgggaaaaagctaaaaaagaattaaaaggtactgatttatctatcgatattatggtcaatgaagaagatttatcaaaaaaactaggtgaatatcttcaaaatgaattgcaagatactttggatggacttaaagtttcagttactgcagtacctgccacgttacaaactgaacgattaaattctgggaactttatgattgcattgagtggttggcaagcagctttgccgatccagttagttttttagcaaattttgagagt

SEQ ID NO: 848 - DNA, 926 bp; double-stranded, linear
cgttgtaacgccttttgcaaccatgcttgctttacgcaattgacggcgttgttttttagttttaccgtggaaacggtgagatgtaaaggcacggccacgttttaagccgcctccaccagtacgttttacacgttttgctaatccgcggtgtgttttttgttttggcatgactaattttcctcctcaaaatctttgcttcaagtgaaagactctaacagtcacaactgtcgaatatccttcttgtagaaattaccaaaagtccgaatgctcggtctcttcgtttacttgtcgtttttcggtgccagcgttagaaacatgctgcgtccgtccattttcgctttttgttccactgtggcgatgtccgcagtttcttcagctaagcgatcaagaactttctgaccaatctctttatgggtaatggcacggcctttgaaacggatagaagctttcactttgtctcctttttctaagaacttacgcgcattacgaagttttgtattgaagtcatttacgtcaattgttggacttaaacgaacttctttgacgttgatcactttttgtttcttgcgagcttcacgctctttcttttgttgttcgaaacggaattttccataatccataattcgcgcaactggtggtttcgctcctggcgctacaagtactaaatccaagtttgcagattcagcgatttgtaatgcttctgctttggtttttacacctaattgttcaccatcttgtccgatcaaacgtractcgcgtgcacgaatgccgtcgttaaccatcatatcctttgctatggtcattcacctccaaaattttnaagagaaaatcctaacggaagtctgctttgtttgctaaatgcaataaaaaaacaggttcctatccagaacccgccaacagtctgccttacttaaaaaaataaggaa

SEQ ID NO: 849 - DNA, 206 bp; double-stranded, linear
actcaaactatttcgaacgataatcgtataccagctgaatttgtccgtcatgttgatggagataccaccgtgttaagaatagacggaaaagaacaaaaggttcgctttttattagtagatacacccgagactgtaaagccgaaaacaaaagtacagccatttggtttggaagccagcaaccgtacaaaagagcttttgtctactgc

SEQ ID NO: 850 - DNA, 310 bp; double-stranded, linear
atcaaattctttttcttacaataattaaaaaccatatttagaacctgaacaagagattgtaaactatttttagcataaccaacattaacgccatcaattcccttttcttttaaaatgaaaaggaatttttgtagttcttctgatgataaactacttaattttttaccaccaatccatcgattaagtattttcacctgtncttctcgtttatcatacgttgccaccttttgttcgtttagtgatcgataatattcaaaccacttttgactaacaacactaaatttatcattactagcaagcctntnttgct

SEQ ID NO: 851 - DNA, 257 bp; double-stranded, linear
cctttgaacattactgaagccaacacgtaatcgacttcttcccacggaatttggataaacttacgtggatctttggcatggtaaaattcaaacccgcggtcacctatcataatttgtccataatctgttaatcctgtaaatgccgtcgcatctataactaaatcaacttttgtgtttaatgattgtaccatgttatctkctccatttcattcaactaattcctctttattatacttttctttcctcatctaaacaaa

SEQ ID NO: 852 - DNA, 731 bp; double-stranded, linear
cacaccttactcagcaaatctcgtcacaaatagtactacaaaaaccttcgtgttattattaaatagccatgaaacttttgaggcttgggttacgagctttattgataaagctcaagaaaatggctataactgcttgattttaaatagtcacggtagtttagaacaagaactgaaaaatattacctcgccaactttaaaacaagccagtggcattatttgggacccaatcaatgaaaacagtaaacaatacgcgaaatttatagaagaattaacgattccttactatttcgtcaatcactcaactaacgaattaccttctctagcggggctttatgaagaagctagttatgttttaacccaagaattattacagaataaccataaaaaaattagttatttcgtcactaacccmaaatwtaaagrrgcmattattgcmggctataaaaaagccttgtttgatgtcaatttaccctttagtaaagaaaatattttaactactatccctgctggatttcagtaatcagcttatcacagatgggattacgggtatccttactggatgactatacccaggctgtttttttggaacagcttttaaagcagagcggtttgcgaacccccgataattactctttactcgcaattaagcggaaaaatggatcggtgccattttaccggatccnanttcctncgncctaattagataccgagacggttgggtagccagttag

SEQ ID NO: 853 - DNA, 142 bp; double-stranded, linear
tcactcgtttacatacgaaagacagctgcgattttgtagamgcatctggttctttctgccaaagcaagcgacaaatttgatcacgatccaacccttcgtgggcatgctgatacaagatttttaaaaagcgttgctcgttttt

SEQ ID NO: 854 - DNA, 301 bp; double-stranded, linear
aacatacacatttccttctttaaccaatggatttaattgatctaacacaccagctaattcgccagagttcttctctgcgtaaaacttggccccaaataaaccaccaccaataacaattgctgtcaccactaaaaatttaataaatttcatcacataaatcctcccgagtaattattctctgttacttcttccaaagtatagcaagttttaaacaatccttcctcgggcgcaacgaccagtttttcctcagacttatgtcgtatntntgttattttgaataaataacaaaacactactcntc

SEQ ID NO: 855 - DNA, 330 bp; double-stranded, linear
tgcagcagctgcagttgccgactgaaaatccccgttgtgatcccaaaataaagcttctaacatttttgcacctcgatagttttattttaattatctactaactatcgatatctttcaacttaagattatcctcaatcaatatttttaaatcagaaaattaattcaatttgcattctaatccatcaaattctkgttaatattattttgaatgtctgcttcatcaaagaaaccatgcccacaataaaccaagcttacaatcatcaatttcccttggcgtggctccctcggncatttccaaaaataggangcatcctttttaatctggcacag

SEQ ID NO: 856 - DNA, 582 bp; double-stranded, linear
aaggtgttagaaaaaatgctacctaactcttctgatgttactttttacaaatttttaaataaacagcatagtttgtatgaacaacaatttgaatttttaaaagaagtaattcaatttagaaaaaataatgaatatgaccaatatagccaaatagggtgtaatttattacactatgatttattaatttcaggattactttttgatgttaagtcttatgattattcatatcaatactttttaaaattagatttagctaactatttttctgaattagagattcctgatgaatacaaaatgttaataaataagtatcgggagaatgaatcatgattaagagacctcatgkaatgcaagakagtatacmagatgtggtgktgcatgcatagraatgrtatgkaaattcyataatattaatatagrtagaagatatatccaagaagaaactggctatggaatgataggaatatcattaaaagctatggaaaaatttttttcaaaagtagatgcaaacccagaaatagtaaatatatctaaaattaataggttaaacaaagaaaatagggaaatgattaataactcact

SEQ ID NO: 857 - DNA, 484 bp; double-stranded, linear
tgcanaaattaaaagaattgcaatagctaaatagttagtttgattaaaatctattacaaatttttttaatagttctaaaactgtagatagtgcaagtagagctataaatattaatattatatttaaggaagtttgtatatttttttttaaagtttgactattgttatttacactaaaaaatgttattaatgactcttttttacacatttcaataactttgattctaaacagtaatattttttttatatttgtttttaaatcgacttttcgttttttttcatctagaatgacttttccatctctggttagttcaacaacacccagaaacagttcttctttattactattccataataatatcggcccctgaccatgatttttatcaatatcaaaatcagawataataactttatctgcaacttttcttaaatcattttctagtgtttctgaagttaagttcttatttaatttatggatcaatgtg

SEQ ID NO: 858 - DNA, 587 bp; double-stranded, linear
gcgtaactcatgtgttcaccccctgtccgttgctctctgaaacaaatggtataaggtaaagggcaggtgaaccttggtctttacgaaaaaagttttganaatttttttgtgcctgattgcgcattttgctacctccgaaaatttgaaaattagtgaaattccaaacctttttggaggtttaatgtctgattagcatatctgtatacgtttgataatgcgcttaaatgattttgaagcggcgcgntctgtgccacactttttttgacgggatacccgccgtgtatataaaaataaaaccatccatgtactgtccctttctacggacagacacaaatggcaaaggaagtaagccctgatggcggtattcttctttgcgctggcgttccatttcacgctcatagtcggcaaagacctgatagattctctggatacctcgaccgtgatgggcttaccgctaccatcaaaaatcgtaacgtaacacatggctccctcctgtgcagcgtcatccaggcagagaagaatgccakgggggaaatgtcgtcatcaggatcaaggggagcgncccatgctgcacaaccgaggggcaa

SEQ ID NO: 859 - DNA, 3549 bp; double-stranded, linear
gccnccnttcaaaggagtngcaccatcaggaaaattagctactgcacaacaagcagaatcagcgctcaacagcaaaaagtgcaagtcagcaagtcttaaatacagccaaaacaacacaagcaacagcagaaaaagaactatctgttcataaagcgacattggctagtcttcaagcagttgcgactaaaagtacgacaaattatgaagaaaaagtacgacaaactgcaacggcagaaaaaagccttcaacaaacaaaagatcaattggcaacaatcaatgagttaattcagaatcgagctgctgttttagaaaaagcgaaaacaaacgtttcggaagcacaagcaattgaacaaacgtctgctaaagtgctgaaagaaaaacaagcagcccaaaaagcagaagaaaacacattgaatagcttgaaggaagtattgaatttagcaaaagaaaatttaaatcaaaaacaagttgcatttaaaacaagtacacgttcattgtctcgtttagaaaatgctcaaccaacatacgaaaaagcattaaacgagttaaacaaagcagaagcagcagcggtccaagcacaagaagcctatgaaaattctctgaaatcattggaggaacttaaagaacaacaagccgttgctacacttgcttatacacaagcacaagaagacctttctaacgcgaagttagagctacagcagtaccagggcgtattaagagaattagaagcacaacaagccgaacagcagcgacaagaagcgttgcaagaacaagtagcaaaagaacaacaacgccttgaacgagaagcaaaacaaagccaaacgttagtagcaagtgctacttcagcagacaaaacacctggtctccaacagttatctttttctaaacaaaaagaacagccaaaagcacaagcattaacacattcagaatctcgtaagacgaaacaagtagcaaaagccccagattctttaccacatacaggagaaaaaaataataaatggttagctatagctggtctgatatttgctttgttaggagctgcgggtattataagttttattagtagaaacgagaagaaagtaaaaaatatctttaaaattaaataataaagtcaaaggagcgacatatttcgctcctttttattgtaatcattggaataaattgaaaaataaaaaaatagccaaccaaaatggttggctgattgtattaaaggcagaagaatctaccaaatttaggagccaaccagtttccgctggtcaacaaaaaataaatggattgtctcggatggagacacttaaatagtacctgacaataaaattttaggcaacaaaaaagtcagccgttttccgccgactgactaaacgaataagatttgtaaagaagtgatttgtactttttacacaattatgatagcacgttaaatgtttttaacgcaaaaaaaagctaagggaatcgaaaaactttcggttctctttttgtgaggaggaatggaaataatgatgaaaaagcaacgagctccttgtgttgcgtgaactatttttacaaacaaaaaataaaaaatcgaggagaatgatacatgaatcaacagactgaagtaaaaaaacgttttaaaatgtataaggcaaagaaacactggattgtagcccctattctttttttaggtgtattaggagctgtaggattagctacagataatgtacaagccgcggaattagatacgcaaccaggaacaacgacggtgcaacccgataatcccaacccgcagtcacgaaatgaaacacttaaaacggcagtatctgaagaagcagcattacaaaaagacactacttctcaaccaaccacagcagaagaagtagtgccgaaaggaattgctgctgaacaaagttcagctacctcaaatgataccacaaacgtccaacaaccaacagcagaagcagaaaaatcagcacaagaacaaccagtagtcagccctgaaacaaccattgaacctctagggcagccaacagaagttgcaccagcagaaaatgacgctaataaatcaacgtcaattcctaaagaatttgaaacaccagacgttgacaaagcagttgatgaagcgaaaaaagatccaaacattaccgtcgtggaaaaaccaactgaagacttaggaaatgtttcttctaaagatttagctgcaaaagaaaaagaagtagaccaactacaaaaagaacaagcccaaaagattgcccaacaagcagctgaattaaaagccaaaaatgaaaaaattgccaaagaaaatgcagaaattgcggcaaaaaataaagcggaaaaagagcgctacgaaaaagaagtggcggaatacaacaaacacaaaaatgacaaaggctatgtgaatgaagcaatcagcaaagacttagtttttgattcaagcattgtgactaaggatactaaaatagacaagattacaggtggcaagtttattaaagcttccgattttaacaaagtaaaccaaggacaatccaaagatatttttacaaaattaagtaaggatatgaatggaaaagcaacaggcaacttccaaagctcaaaagtggctgctgttgaatttggccctaaaggaggatacgcggttcttttagaaaaaaacaaaccggtcaatgtcacgtatacaggattaaatgctagttatttagaccgaaaaatcacaaaagcagagttcatttatgaacttcaatctgcaccaagtcaaagcggcaccttaaatgcagtattttcgaatgatcctattattacagcatttgttggtactaaaaatgccaatgggaaggacgtaaaagttcgcttaaccattaaattatatgatgctaatggcaaagaagttttaccagataaagaccatgcctttgcctatgcgttatcgtcattaaactctagtctaggaacaaattatagtgtagaacatgcggaatttgtttcagactttggctcaaaaaatgagttcaagtatattaatggttcctacgtaaagaaacaagcggatgggaaattctactcaaccgaagaccttgattatgggacaggtccttcaggactaaaaaatagtgattgggacgctgtaggtcataaaaatgcgtactatggttctggtgtaggtctagctagagagggtggacgtatttctttctcttttggtatgacaaccaaaggaaaagtcaacctatctggtgcgcaatggtttgcctttagtaccaatttaaatgcgaaatcaattagaccataccaaaagaaagggaatccaaaagaaccagaaaaagcaacaattgaattcaatcgatacaaagccaatgtcgttcctgttcttgtgccgaataaagaagtcactgatggtcagaaaaatatcaatgatttaaatgtgaaacgaggcgattctttacaatacattgtgacaggggatacgacagaacttgccaaagtagatccgaaaacagtgacaaaacaagggattcgggatacctttgatgcagaaaaagtgacgattgatttatccaaagtgaaggtttatcaagcaga

SEQ ID NO: 860 - DNA, 308 bp; double-stranded, linear
aattctaaaatttattttaaaataagaatttgcattggcatttactttgtcagcgggtatacttatacttgatgtattttgcatttatttcagaaaggaatggtgacatgctttttgctaacctatggaaagcaattattcttggtattatcgaaggaattaccgagtggcttccaattagtagtaccggacatttaattttagtggatgagtttattaaactcgatctaagtaaagattttatggaaatgttcaacgtcgttatccaattgggagcgattatggcggttgtnattttatacttccac

SEQ ID NO: 861 - DNA, 175 bp; double-stranded, linear
cactatcacaacaaatcaacagtttggaatgctcaggaaaagatttagcagatataaacccaactaacactacaggttgaagagtccaacgcttgcaaaacaagagatgaaattactgcatgcagcataaagctgcagctttcaggaccaatagcaggggatctccccatccacc

SEQ ID NO: 862 - DNA, 198 bp; double-stranded, linear
ttcctttagtgaagagagtctttggttggtggaaaaagacgtaaagaaacagcgaaccacatctgggagttgactttttgaacccttagtaggaaagtccgggaccactcgttaacaggcgaagttatgaacttcataaggtcgtgttgcgaaacacgaataaactaaggtggaaccacgataattgattattcgtcc

SEQ ID NO: 863 - DNA, 372 bp; double-stranded, linear
tgattattttaatagattggtgtagtttaatatcaaaatcaatattataggtgataatacacatagagaaataaarataatcaaaaaatagaaccattttttagaaactagcatacctaatcctatcgttcctagtgtgtacagtactatcaaaataagatagatttkkgttccatttcctgaaaaatccgtcttgctcacactagttatcattcgaagaatagcatatataatccccaaagagcacaacatccaaataaagctactaatatatttaaggagattcataaccagacctactttctattanattactnagagtagcctttccaagtttgtgtgtgcgtcgctctaacatcaaagtaatcagga

SEQ ID NO: 864 - DNA, 249 bp; double-stranded, linear
cattggtttaaaaatgacaaacggtcttgaaattttattacacatgggtattgatanggtagagttaaacggggcaccgttcactattaaagtgaaagaaggngaccaagtgactgcagatacggtggtcgcaattgctgatttagaagcaattaaagcagctggtaaaggaactgaaatggttgtcattattaccaacatggataaagtaacacaattttcgttagagaaaactggcgtggttacagc

SEQ ID NO: 865 - DNA, 683 bp; double-stranded, linear
attttccgaggaaatatttataaaatgcatatttaccgcctaaagcaaacggtggcgatatgagtttacctgttacctatttgttaaaaaatgccacaaaatttatttatgtcaacacttcatttttcaaggtattttttactattaaagaactgccttacattgctgttttagatgaaaataattatttttacggcatkttaacacacagcaccttattaaatattttagcgcaatcttggaatgtaaaacaagggagctacgttttaacaattgcttcagttggtcaacaaggcgacttagcagccatttcaaaaatcattgccaaatatagcagcatcgccagctgtattacattggatgtcgatagtgaagaatttgttcgtcgcacacttattactttaccagccggcacaactgccgaaacgtgtacagccattgtagaacatttagagcggaaaaactttaaagttgtagaattggaaaatttagaagacgagtaaaatttacgacctttagcttaggatttamagctagggaggtaagccaatttgacttacctccctagcttatttttttagacttcttcaccaataattcgaacttccgtttgcaattcaacatcaaatttttctttaatcacttcttggatatgtgcaattaattccacataatctgttgcg

SEQ ID NO: 866 - DNA, 716 bp; double-stranded, linear
aatgtaataatgcccatttgaacttgtgcatttggttggttttctttatcaaaaaaaatcgtcatttcttctgattctgctgatttaataagcaatagcttcccctccttttttaaatcttgtatcttccattattcctttaaatagaatcaaagtcaatctttttatagaaaattctgaatattctacacaaaaaaagagagcatgaattctctctcttttgnctctttaaacttttacaatccagccttctggcgcttctttgtcaccaaactgtatgccaaccagttcatcatatagttgcttagtcactggtccaacttccgtttcactataaaatacatggaaatctgtgccgttttgaatcccaccaataggagaaataatcgccgctgtgccacaagcacccgcttcggagaagtccgctaatcgatcaatgtaaacgtctccttcaagcgccgtcatccctaaacgttcttttgctagcgtcaataatgaatatttagtaatacttggcaaaatagacgntgatttcggcgtaataaaagtaccatctttggttatgccaaagaaattggctgcaccaacttcttcaattttcgtatgcgtatacggatctaaataaatgcaatcactaaattctttctcatgtgcttctgcacctggtaaaagactagctgcataattgccccccactttagctgccccagttcctc

SEQ ID NO: 867 - DNA, 582 bp; double-stranded, linear
tacgtttcatccattttccatgaataaaaggattttttatttttctttttccaaatttgatagagtagtttgccatattcttgcacccaacgataaatcgtcgtatgagaaacgttaatgccacgatcatataagatttcytgaacytcacgatagctaaggttataacgragatagtagcccacggctacaataatcacatcctgctgaaattgctttcctttaaaatgattcatcgtcattcctcckgctatctttttctattattctaccttatttgatagtagatttaaaactttgcaacagaaccaatggtattataacaagaattactaatgttaactttgcactaaggttaattaggactatcccatataaaagaacttcaaatattgataacacaactttgggtattgtagaactaactaaagtatacatactacttgcatcatttgataatatactagcgatattaccagraagagaatgctcaaagaaagaagttcgcatatttagtatttgttttataactttagctcttactttatttacaataattattcctattttttgtagataaaa

SEQ ID NO: 868 - DNA, 422 bp; double-stranded, linear
tgatgtcactttctgtaacggtacatcgtaaaaaggatcttcacgacgtcctaaaaagtcttttccttgttgcgggaacatcgcatataataggacatcctcttcagattttgcatattgttggatttccttttctaaactatgcaactctggtttcaataaatccgcggtcgacaatgattacctcttcatccccatgatttttgcttaatctctcgcgatagtgcggtgattgccatatctccgcgcacataaycttgattcattcgkgattaaggatatcttccccagaaatcacatccttaaggctgtggtccaaccattgtgaaagcggcggactagggggaacccaaactgcctacttaggctcagcaaaactctcaattgctggaactgcccggaatgctaaaaggtganacaac

SEQ ID NO: 869 - DNA, 1069 bp; double-stranded, linear
tactcagggaaatcgaattttctttctcttcctgcaggtactaagatgtttcagttctctgcgtctacctctaatcagctatgtattcactgaaaagtaatatcctataaaagatattgggttcccccattcggaaatctctggatcatagcttacttacagctccccaaagcatatcggtgttagtcccgtccttcatcggctcctagtgccaaggcatccaccgtgcgcccttattcacttaaccttatcaaccttacggttgggtcttratcacttcttctagcgatagaaggttaatcaataaataagcaattgaacttattaaaaaactcattcaacgcggtgttctcggtttgttttgattctttttacttcaatatccagttttcaatgaacgaatctgatagcaaaagctatcaatggagcctagcgggatcgaaccgctgacctcctgcgtgcaaagcaggcgctctcccagctgagctaaggccccgaatttatttgattgagagtagacctctcaaaactgaacaaagtaaagacgaaatgtgtatttccgtaatattccttagaaaggaggtgatccagccgcaccttccgatacggctaccttgttacgacttcaccccaatcatctatcccaccttaggcggctggctccaaaaaggttacctcaccgacttcgggtgttacaaactctcgtggtgtgacgggcggtgtgtacaaggcccgggaacgtattcaccgcggcgtgctgatccgcgattactagcgattccggcttcatgcaggcgagttgcagcctgcaatccgaactgagagaagctttaagagatttgcatgncctcgcggtctagcgactcgttgtacttcccattgtagcacgtgtgtagcccaggtcataaggggcatgatgatttgacgtcatccccaccttcctccggtttgtcaccggcagtctcgctagagtgcccaactaaatgatggcaactaacaataagggttgcgctcgttgcgggacttaacccaacatctcacgacacgagctgacgacaaccatgcacca

SEQ ID NO: 870 - DNA, 144 bp; double-stranded, linear
cctgatgaaattgtcgacttttatgaagacttacaagagattgatttatcaggaaaaatcttcggcgtttgtggttcaggagacacgttttatgatgatttttgtaaatcggtggacgacttcgaagcagtctttactcaaatt

SEQ ID NO: 871 - DNA, 871 bp; double-stranded, linear
tcngaaagttatccacagatgtggataatgtggacaatcagtggcgaatatgtgtttgtattgaaaaagctgttaaataaagtaattttttagtttgttctgtggataactctgtgtatatgtgtataattatgtggaaacgttgtggaaagtagccaaacttcgtgctaaaataagaaagaagagaaaacgagaaagtagtggaataggtgaaaattaaactagtaacagtcggaaaactgaaagaaaaatacctgattcaaggcattaatgaatatctgaaacgtttaaatagctatgccaagatggaaatcattgaagtaccagatgaaaaagccccagaaaaactcagtgacgctgaaatgcttcaagtcaaagaaaaagaaggccaacgtattttggggaaaattaatgacaacgaatacgtctttgttttagccattaatggcaaacaattatctagtgaagaattttcaaaaganattgaacaattagggattagtggcaaaagtaatctaacctttgtcattggtggctccttaggtctcagtgattcagtccttcagcgaagtaaccaacaaatttcttttggccgcttgacttatccacatcagttaatgcgtttggtattagtggaacaaatttatcgcggttttcggattatgaaaggggaaccgtatcataaataggaaataggctggttgctcagtaagttctatgaatcaagncattgcttgaaaaatatatgaagtaaaatatctttagtctgtttgtctgatagaaaataaaaaaattcaatcaaactggattgagagaaacgttaccgttcaaacaataaataaaaatgagaggaatggcaaaaamcatggca

SEQ ID NO: 872 - DNA, 345 bp; double-stranded, linear
aatatttttattagcgtgttcaaatcctgatttcttgtatcaattattttctgttcactttcaataagaaaaaagtctttacttccatggctaataataagtctctatttttcataatatgcaaaattatatcttaatagaaaatatttttattttaaagataaaaaattcttcatcctgcaatactttatattctatattgtaattattcagaatattacttacaatatataaacctaatccattactatttcccttatttaaatcaaatttaacatcaaatattttatccatattcgaaattttattgttaccgtatgaattctctatatataaccaatcatt

SEQ ID NO: 873 - DNA, 443 bp; double-stranded, linear
ncccccattatatggaataacacctgganctatatttccaaaggatccctaaaattanggtttatgtccatggtttcaaatgtatctaaatacttttccgacaanccttcackgagtaaatcaaattgtaaaagtaacttttggcactgcacctccagtgccttttcgtccaaatgataatctattaattgagaatataattttttagtttctttrgttctgttgcaaagttttaaatctactatcaaataaggtagaataatagaaaaagatagcaggaggaatgacgatgaatcattttaaaggaaagcaatttcagcaggatgtgattattgtagccgtgggctactatcttcgttataaccttagctatcgtgaagttcaagaaatcttatatgatcgtggcattaacgtttctcatacgacgatttatcgttgggtgc

SEQ ID NO: 874 - DNA, 325 bp; double-stranded, linear
atttgtttatgagcatcaagacattctcttctagaaatgaaaagtaggttatttatcctttcgtaacatgttaggcttattcaactatgcttccaatcgaaatttaattaacttaacaacttaaaatgttctctttattgattttcataatttaaattgttcaaattgaattagataaatagtaatacttcccatattaaaatttattttttttcagccctataatacttacaattaccgtgaataatcctaaatacatgggaagaccattatacttttctccagttttcggtaactccatagtatttttatttcgattactncn

SEQ ID NO: 875 - DNA, 428 bp; double-stranded, linear
gatcaatccaattatttgtattgnatattcacatcggtcttgcaacattgcgtaagctatttnactatcattagacatagttttataaaattctgatgtaaaaagtactttaggtaattggtaatacaaatttctataggtttcattagctgaaataaattgaaaatcgttcatagctttacctctctgtttttgttagtttatagtttaacctacttttatttcccttgcaaatactgatataacagtatttgcctgctntcttagtatatcacgatattgcgatataacgcaattgtaatattggaatatcgtgatattacaatatttaaaagattattattgatacaacagcgtttgtagaaaaaaaacaacaacaatattatgatattgttgttgtctaatattgtaatattgtgattccacaa

SEQ ID NO: 876 - DNA, 155 bp; double-stranded, linear
ggaaagnagtagtctatgataaaatagtaaaaagagcagaaatgaggacaacgaatgaaaattggagtcattggtttaggaaatattgcacaaaaagcgtatttgccaacttatagtgaatgccgccacttggcagagtttgtattagcaactag

SEQ ID NO: 877 - DNA, 277 bp; double-stranded, linear
gccgaataaaagaagtttctgatgatattgaagttgtggctatcaatgatttgactagcccaacaatgttggctcacttattacaatttgactctacgcatggcacctatcctggcaccgtgacagccactgaaaatggcattgtggttganggcgaaganacccgtgtctacgcagaaccagatgcaagtaaaatcccttgggttaaagaaaacggagtagacattgtccttgartgtacaggtttttatacctctgaagnagaagcacaagctca

SEQ ID NO: 878 - DNA, 364 bp; double-stranded, linear
aaaagtatactagtatactggtatactttcctttagcaaaccttttaacaagcaagatttctaaggtatactggtatacctttgaataaaagtttaagtataccagtatactgncacgataaaagcaacagtataccagtatacttacgatcatattttggagtatactggtatactattgctaaagaaaataaaaaataatgatttacaaatwtaattatgtacggtattttttaagagtattgaatttataaatattaagataaaaaaatagagacggtaacttacttgatcgccaaatcaaataagttacagaatcaaaaatgtacacccattttcaattcttttgcgtccctggatgata

SEQ ID NO: 879 - DNA, 211 bp; double-stranded, linear
catgagtgttgcctggcaatatttgtggggattttttgattattgttagcatttttctagacaagaacaactgaaaaaagagtttcttttttccattatgttttgtttctgagtttaaccaaatcactcattatttcaaggaggaattaggttatgtcagtacaattagaagtcaaagacagagcctatccgtccaaggttcaactaagga

SEQ ID NO: 880 - DNA, 418 bp; double-stranded, linear
atcttttatttagaatgaatagggatctgaaatataagattttttgatggagaaaaccaggatgatttaatagttatycatatacatatgactcaacacgnaatagatggtgattaacagagagttatccaaattattatatatagaaataattcaaaattattttaaagaaattctaacttttcactcgataaaatatagtgtaaaaacgcaacttgattcagaggatgaaaatgaagtgttcagatatgagttgaaaaatacttatttcaattgattgagtaaagctgttttatcattattagtaatatgaagatttttatatcagacttagagaaaagctttactacactcttgttaactataatgcttttagcgagaaataatacctaaagtgtaagctaaaaatttatcatat

SEQ ID NO: 881 - DNA, 408 bp; double-stranded, linear
acatcttttttnctggnacattaattgngctactttttttaattgtgtcgagttaaatctccaaggaacgaacagtaattttagcgcatgaattaacccctagtnagctacgtcgattttggcaaaactgatttatgagtatctaaaaaacgaacaaatcatcggcctggaaaaattctatacctttaactgtgccgattatgccaataatcccgaattgctatcatctattctcttcggccataccaaaggcgcattcactggggctgaatcagaawaacraggactcttggcccaagctaataattccgtactctttttagatgaagtacatcgattatccaacgaaaaccaagaaaaactctttcagtttatggatacagggaccttccgccctattggtgaaga

SEQ ID NO: 882 - DNA, 465 bp; double-stranded, linear
cttcaaaaatctcgcgattgtgatcgcgaataatatacgtcattgtagcttcttctggcgttccagcaaacgctgctaaatgataaaagccttcttcacctgctgttttttctggaacttcgtcagcaggtaaggcattatggaaatcaattcctaattgtaacgcattaatcattgtatttttggctgttcctggatgaacgtttttcccttgaattgtaatttctgcttgcgccgcattaaacgtttcaaattgtaattcgcctactggcccaccatccattgtataagcaaaatccacgttaaattgagcgacatcaaatttgtcgggcacctacaccaatttcttcgtcaggaccgaaaagccacacgaatgggggccatgtttaatttcnggggngattaaattaaatattcccngggcggtcaataattccgcaatanccggatttatcaaccagctcc

SEQ ID NO: 883 - DNA, 341 bp; double-stranded, linear
aaagttttgatgataaaaattactattgctaacttattagaaggggtcccattattactcttattaacattatacaaataatctttccaatcactcctgcaaacgggcttcgtctctaactgaaggtctattacattagcattgtgcgcacatgcattcctaacaaaatttatacattttagccatgataataattcaatatccgtacatctaaacatttttgaaagttttcgtttatttctagtagacataatttctactaatctaacaagttcaccaaaagtaagaacttccacagctaaccaaatacttggaaaattatctttttctttantcctnnt

SEQ ID NO: 884 - DNA, 197 bp; double-stranded, linear
aaagatggattcttctttactcacacctaaaagangtttttctgaatcctttagtaagaaaaaccggtgactctatcgttaacagagagtagttgtcaacgcaactacataaggcttatcttgtgaaagataagtaaattgaggtggcaccacgaatgcgattcgtnctcttggctcacagccaagaggcttttttg

SEQ ID NO: 885 - DNA, 1548 bp; double-stranded, linear
cggaattggactanccnattgaaaaccatttctttttntcctaaaaaaatcgaagatgggtaataaaaagaatgggtaatctgataaaaaaacgaactttatctaatcggataagaaagaataatcggtattgaaaaaaagtttaaaaaaagtgaaaataatgattgaccaatgcttgaaatcttggtatattatttacatggtcgcaaggcgagtcacacagctgagcgattcagaagtcaataattaaataacaattcttgatttcaaatctctcgaaaaaagtttgaaaaaacaacaaaaaagttgttgacaaatamcaaacgagatgataagatwtagaagttgtcacaacagacgacaacaaccgagcaaaacaacttaaaaaaacttttttaaaaaagttcttgacattcraaygaaagtttgttawgatataaaagttgctgcgaggtaacgtagacctttgaaaactgaacaaagaatagacgaaccaaatgtgtagggcgtcttgattcaattcaagacaacaaacatttttaacaagcaagcaatatgctagcaaacaaattgagcttaacaatcgwaagattgttctaacttttattatgagagtttgatcctggctcaggacgaacgctggcggcgtgcctaatacatgcaagtcgaacgcttctttcctcccgagtgcttgcactcaattggaaagaggagtggcggacgggtgagtaacacgtgggtaacctacccatcagagggggataacacttggaaacaggtgctaataccgcataacagtttatgccgcatggcataagagtgaaaggcgctttcgggtgtcgytgatggatggacccgcggtgcattagctagttggtgaggtaacggctcaccaaggccacgatgcatagccgacctgagagggtgatcggccacactgggactgagacacggcccagactcctacgggaggcagcagtagggaatcttcggcaatggacgaaagtctgaccgagcaacgccgcgtgagtgaagaaggttttcggatcgtaaaactctgttgttagagaagaacaaggacgttagtaactgaacgtcccctgacggtatctaaccagaaagccacggctaactacgtgccagcagccgcggtaatacgtaggtggcaagcgttgtccggatttattgggcgtaaagcgagcgcaggcggtttcttaagtctgatgtgaaagcccccggctcaaccggggagggtcattggaaactgggagacttgagtgcagaagaggagagtggaattccatgtgtagcggtgaaatgcgtagatatatggaggaacaccagtggcgaaagcggctctctggtctgtaactgacgctgaagctcgaaagcstggggagcnaacaggattagataccctggtagtccacgccgtaaacgatgantgctaartgttggaaggtttccgcccttcagtgctgccagcnaaacgccnttaagcactccgcctgggggagtacgaccgccaaggttgaaaccccaangaat

SEQ ID NO: 886 - DNA, 486 bp; double-stranded, linear
aaaaaacaaccattgcctatgtagaacaacgtagcgccttggatcttagtttcccaattagcgtttttgaaacggtcttgctaggaacctatccaaacttggggactattaaaacgcccaggaaagaaagaaaagcaagcagccatggctgcattaaaaatggtgcaattagaagactatgcgcaacgccagattggcgaactttctggtggccaattacaacgtgtgtttatcgcccgtgttttggcccaaggtgctgaggtgatttttttagatgaacctttcgtcggcattgatatgtctagtgaaaaagtgattatggatattcttaaatcattaaaaaatcaaggtaaaatgattatcatgttcaccatgattgcacaaagtgtcccactattttgatgaattaatcgtttgaaaaancggctaattgctgcngggcctggtgnaccaaacattactgcagaacgctcccaagaacatacc

SEQ ID NO: 887 - DNA, 271 bp; double-stranded, linear
cagacgcgcacaaccattaaaacaggtgacgattctcttttatgtgactgtgccagaagcctttcgngaacgggcgacacggtgtttgaagcttgtctccccaaactgtccagtgattcaatcattggctgaaagaattactgtcgaagaaacagttgtatttaaaaagtaaaccattagagacattatcgttacgagcgcttttccctttttggatgcctcgtttctgggaatgtcttttnttagaggagcgtagggaaatagctgtaga

SEQ ID NO: 888 - DNA, 316 bp; double-stranded, linear
gcaggcagaggaggcacctgtagggggtggtgggctggtggcccaggagaagtcaggaagggagcccagctggtgacaagagagcccagaggtgcctggggctgagtgtgagagcccggaagatttcarccatgcctcacagctccgacagcagtgactccagcttcagccgctctcctccccctggcaaacaggactcatctgatngatgtgagaaaattcanaggaaggagaaaaattcgtattgccgcccagaagagccgacagaggcagaccacngaaggccgaaaccctgcaacttggagagcgaagacct

SEQ ID NO: 889 - DNA, 173 bp; double-stranded, linear
agtcaagaccatagccttctaaattgatttcagcaatatcagctaagggcgtgcgctgcatcgatgtcttcwtgtgtgcaagttggtgatntaaataataatgtatcagaaataatcgctgagaccatcataccagcaatttgagctggaattgtcacgttattttctttaaa

SEQ ID NO: 890 - DNA, 160 bp; double-stranded, linear
aagaaggcggcaaaaaagcgtttgaattaattaaagaaggtatgaacaatggtgcgaaagttttaggcttagcaacaggtagtacaccagnaacattatataaagaratgactgcaatgatgtcgactttacagaaatgacttctgtaaacttagatgaa

SEQ ID NO: 891 - DNA, 403 bp; double-stranded, linear
aggtgttattttaacattagtaataattgcagcattacttattttatctagtagcttaaagttgcaagttttattggttaagtttgccaatcgttggtttaaacgaccaaaactaagagattgggtggataattgtaatttacaaatctattccttgcgggcagctgtccaaacaattacacaagaycgctcagcgttgcttcgaatcttttcatggaatgtatttaaattattattttggtacattattccttacattgttttagtagaaaatcacccgaatattgatttattattagtgatgtcctttaccagttttgctggttattctttccagganttattcccgacacctgctggcattggtccatttgaaattgtttacttattggttgtttaaacc

SEQ ID NO: 892 - DNA, 499 bp; double-stranded, linear
naaatacgaattcgagcccggtacccaanaaacaattcaaattaattgattgtcgcagtgaaggaactaccaattattactcactttctcacgataccaccaaaattgagcaactccaacaactattgacccacattacgtcgattatgccagggaggaagcaagcatgaaaaaaattctcgtggtcctcacaaacgtctcccgttatcacggcaccgraraaccaacgggsctctggctaggtgaagccacggagtcgtggaagaagtaaccaaagcangattttcagttgactatgttagtccccaaggaggctatgtccctttggatccccggagtatgaaatatgtagattcatccattatggcagtttatgaaagtgctgattttcaagaacgagcgctagcacattccctctctcttgaagaaattgagccagatgaatacgcagcaatttactttacaggaagccatggcgttatgtggggactttcctgat

SEQ ID NO: 893 - DNA, 303 bp; double-stranded, linear
ctgatgcgtattttctccttacgcatctgtgcggtatttcacaccgcatatggtgcactctcagtacaatctgctctgatgccgcatagttaagccagccccgacacccgccaacacccgctgacgcgccctgacgggcttgtctgctcccggcatccgcttacagacaagctgtgaccgtctccgggagctgcatgtgtcagaggttttcaccgtcatcaccgaaacgcgcgagacgaaagggcctcgtgatacgcctatttttatakgttaatgtcatgataataatggtttcttagacgt

SEQ ID NO: 894 - DNA, 70 bp; double-stranded, linear
atcaattacgccttatcaagaaaaaggacgtccaaagcaaccagaaaaagcaacgrttgaattcaatcga

SEQ ID NO: 895 - DNA, 238 bp; double-stranded, linear
ggaccattttaaggaaattacccgggggggaaaattttaaaaagcccttttgggggccggccaaaacccaaatttttaaggaaaggtttttgggggttaaatnttttaaatttggggggggttggcaattttttttcccccaaaacccaatttttttgggggttcccttggcccccggaaccaaaaattgggggccttaaccgggaaaaaacccccaaggaattttttaaatgggttt

SEQ ID NO: 896 - DNA, 456 bp; double-stranded, linear
tttcaaatagtatagtttgaatgctcaagtatttcagcaacttttataacacaggaggtaataaatatggctgtaccagcgagaagaacatcgaaaacaaaaaaaagattgcgtcgaacacatgaaaaattaaaatcacctgaaatttcgtttgatgagaatcttggtgattatcgtaaaagtcatcatgtatctttaaaaggctattatggtggaaaaaaagtgatggataaaaaataggaggtaatagtattgaagaaaatgaatattatttatccaccacttgtggaacagagctttcaattttatcaagattatgaacaagaaagatatgataagtctgaattatacagaataatggttatgaagaatattattaatgaaaatggcactccaacagaagaggctcttaaaaaaggattagttaaagcttttatgaagatatgatttatcttt

SEQ ID NO: 897 - DNA, 308 bp; double-stranded, linear
tcaaaaagcgggttggctttgagcggtccagttgtgagacgattaaacaaacctgaatggattcaattgtatttagatgaatcaagattagcattgtttgtaattccctgtaaagcgacggacgaaggcgctagaagttgtgtaaatccgaagtcaaaaaagaaagcagggtatcgtaaaagctggtcaggtagcattttagagaaggtagcaaaagccagcaagatggatattgaaaatcatcgttatcatgttgaaccagnaagcgttgaaggctatccaactgactcttggttttgatttaacga

SEQ ID NO: 898 - DNA, 62 bp; double-stranded, linear
caagtgcttggtactttagccactggttctgttaccggcacgttgcttggtcctcttttggg

SEQ ID NO: 899 - DNA, 484 bp; double-stranded, linear
ttcattaatcatattcgtngctgcattatttttattcgttacatagctgtcaatttgggaaanggngttatttttttgtgaatcaattgataagttaattgtataagtaacataaacgcacaaagcagccaccgttaacaaaataatacttgttaacagtagactgtatttttgtactaatcgatttaataaatatttttttttaaacagttttttgaagattcgcttcattttgttccaactttccatcaataaactggcgatttttgcgcgtgacataggcacaccacatcataattaagggcaaacgaagcaaatagtagcagtnctttcattttccagttaaagcaacgatactaattacaccgaataagactttaaaaaatacaccgaggtttaaaaagatactgataaatggaaggctcattaaatcaataggttgagataaaatagctccctcctatagtagcctataaatgtaaaa

SEQ ID NO: 900 - DNA, 181 bp; double-stranded, linear
aaagtctcttttcaatcatttagtatacacctgaaaagaagaataaactatcattaattaaaagaaaaagtgaaasaactagcggattttttgttcagctgattatcttaagaattagaaaatgaggtcgggacagaagtgtttaactcctagaaccaagtaggtactgtttaacatctan

SEQ ID NO: 901 - DNA, 845 bp; double-stranded, linear
ttccgtgaaatacggcgtttggacaggcaaagaattaacaaatcaagggagctttccaacacctggctcttgggaagaaatgaaagcgcatttatattcggtttatgcagacaaaagaaatgagtcgattagtggtgttgcttttagttcacctggagtagttgacgaaaaaagtcaacagattttagggatttccgccattccatatattcatcattttaacatttatgaagaattagaagcgttgtttggcttaccagtgactatcgaaaatgatgcgaattgtgctggtttagctgagatatatgaaggcgcggcgaaagggaaaaaagaagtgctttttgtcgttattgggacaggaattggcggacgatttttcgcaatggtgaattgtacaaaggcgctcatttatatggaggcgagtttggactgaactttttaagtaatggccaaacattcagtgaaattggcacagctgtcaaaatggctcagcgctattgtgaacgaattggagtcgaaaaacaggcggtgacaggagaagaagtttttgaactggcacaacgaggggatgagattgctcgcgaagaagtcaataatttttatgattatttaacacaaggattattcggcttacagttttcttatgatcctgaaatgattgtactcggaggcggtgtttctgctaaagaaggcttattagcagagattaatcgccggatgctaacgcatttacaaacctttgaattaaaagattttgttccagaaatcgtgacctgccattatcaaaatgatgccaacttgantggcgcacgcccaactttcaagccaaaacgattgggactata

SEQ ID NO: 902 - DNA, 330 bp; double-stranded, linear
atatcaaatgagaaaaagttaaattgatcatcctcttccgtcaacaattctttcatcaatgttgttttaaataattcngttaaataaagttctgttcctattaataaatacactggagcgattttttgctctcgcacttctttcaaagctttttgtaactccattggctcgctccttttctcgtttctcttgtttatcctatcatgttacttctggaaatactagtcttgttckttaacaaatttggctttagaaagcccttgccaaggtaaccattgataagaaatcattcctggaagatcggtccganaataatntatggtgtgctcc

SEQ ID NO: 903 - DNA, 276 bp; double-stranded, linear
ataaggggcgtttttctagtgcttagtcgaaaaaaatagttgattcataagttcattgtcttatgaatcaactatttgataactttctctcttgcttattgcgcattcaggatccacatgaatccgacaaaaacaaagaacaagccatacataattggcgaaacttcnttcccacgttttgccgcaatcattgtaattggatagaagataaagcctaaggcaatcccatctgaaatgctgtatgtcaatggcattcctaacaagattaagaaggaa

SEQ ID NO: 904 - DNA, 124 bp; double-stranded, linear
cgcttaaaacttctccttcaataggtgcataaatttcaccattttctggaactactgcatagccatckcccatcattttttgtgagaaggcaggatcattcacttcactggttgggataatggg

SEQ ID NO: 905 - DNA, 143 bp; double-stranded, linear
ggttcctctatgccaacaaataacccggtttgtgtcacatagctaaccattcgatagttgccagaagcaagcncaattcggctcattgtatcttcaacacggtacatttctgcatcgctttctatcataattttaccagctaa

SEQ ID NO: 906 - DNA, 482 bp; double-stranded, linear
tatcaagaaaagtctaacaaaactagatacagagagatagaactaggggaaaaaagtcctaccattgaagaattaatttcttttacagatactttaggtataagattatctgaatttctgtatcggggtgacattacacctctagcagcatcttactatggtaaaagaaaaattgaggttgcttctttaattaataacttccctgaattagagaaacaatttcctgaaatatacaaagatcgctttaagaacctacagtgttacactttatttaccttatgcttaataatctctaaatctttaaataattccttgtatacttttaaaaacaaagatattagagaacttaaaaatttttacaaaaatagagaagtaatattaggtgctggactatgctatactaagtcatctttacagggcagttcccagaatattcganggaactggattttctaacgggaaaacncttcccattaaccanc

SEQ ID NO: 907 - DNA, 147 bp; double-stranded, linear
tggagaacgtctgtatctcactgagcaaaaataaacggaataaccctgaacggatagaattaaaaaagtattctccaaaattgcgcagacgggcaattttcaaagaagtgaaataggcaagtggtaaaaaggrgacaaaatggggcc

SEQ ID NO: 908 - DNA, 239 bp; double-stranded, linear
aaggatgccctacgagcttttgcnaaagctggcggacaaaatgtaactgaacaacaagaagaaggcttctttgataaaatgaaagatgcgtttggcggtaagaagaaaaaataaaccaaacgagtcagagacaaaagcagttagctccaagtgttcatcactctcgaaggctaaattgcaacgagtaattgtaggtgctgcttttgttcaactgattattttaagatttagngagtggg

SEQ ID NO: 909 - DNA, 70 bp; double-stranded, linear
aaatagaaggatgattagagttagcttgtttatcactagctttactatccgaactttgtttagaatttgt

SEQ ID NO: 910 - DNA, 78 bp; double-stranded, linear
cgcattgccagcagtagaaacgctaggaaactgcgaatgttatctgttctgataagacaggaacactgacacaaaata

SEQ ID NO: 911 - DNA, 887 bp; double-stranded, linear
tcatgaaagggattcgttccacggaacnttccgaagaggaatgcctmcttagtcgatttatcattamaaattaaagaagcgattaaaaatgggtattatccgcaactgttaaaaaacaaatctttaggaatgattttccaacaatcttcaactcgaacacgagtatcttttgaaactgcaatggaacaattaggcggacatggcgaatatttagcacctggtcaaattcaattagggggacatgaaacgattgaagataccagccgtgtattgtcacgtttagtagatattttgatggctcgtgtggaacgtcaccatagtattgttgatttagctaattgtgctaccatcccagtcattaacggtatgtctgattacaatcatccaacccaagaattaggtgatttgtgtaccatggttgagcatttaccagaaggcaaaaaattagaagattgtaaagttgtctttgtcggagatgcgacacaagtttgtttttctttaggattaatcacaacaaaaatgggcatgaattttgttcacttcggtccagaaggcttccaattaaatgaagagcatcaagcgaaattagcaaaaaattgtgaagtttcaggcggtagctttttggtcacagatgatgcaagttctgttgaaggcgctgatttcttgtacacggatgtttggtatggcttgtacgaagcggaattatctgaagaagaacgtatgaaggttttctatccaaaatatcaagtgaatcaagaaatgatggatcgggccaggksccaattgtaaatycatscactgtttaccagcaacmcgtggggaagaagtamctgatgaagkaattgacggtaaaaattctatttgtttcgatgaagcagaaaaccgtt

SEQ ID NO: 912 - DNA, 742 bp; double-stranded, linear
gaacagcatccgttacgatttaagaccctggncggtaactactcgtcactttttctaacattgacgaaacgatagaccagganacactaccatggctagtgattagcgacaaaaattcttacgaacgatttttctttacagctcaagaaagcacgcmagaacaagcttttgagaaaatgttaaaagaactagaaaccgaccatgacagtacactagaagttgttcataactggttatgccgacaaacagacgaagcgctttttctaggtattctcaaagaagatagaacgttaaaaggtgctatgacttactgcataggaaaagcccaagaacaatccaaagaccaatcaagcgccatggtggcggacgaagtggttttcagttggataaaagagtatttcttattagagaaattaccagaaaccaaagcagttggtaaagtaacgaccaaaaaatcagaaacaaaacctgaaagaaaagaggtggacgaacaaattgatttgttcgagtgcgtatgaataaaaaacaccaaaaccattaaccccacccaaagccttttttaactggtgtactgcacaaataccaacgtatgaatggcaaaacaaaaaggagacaattcttgcgagttctcgcaagaattgccccaccataaaaaaacgattaacgaaatactcacgattatcgtttccaacgaaattttactcctttgtgataaagtncgacttttgcaagcncagttntc

SEQ ID NO: 913 - DNA, 461 bp; double-stranded, linear
tgaactttgtttcgctatcaagtgaagaaagatatcgaggaatgttagatccattgctatttctgccaagagaagaagctattcaaaccgcacgaaacgtgttagaaaattttggtgaagttacgacagacagtcacactgcagtgakaagaagacgctrattttagattctgtcaatgcggtgatgaaaggtaaaggaaaaaaacacctaacgaaartaatcgaggttattcgcgaaaaagaccctaaattagccaatttaatctctggccacaatgttgggttaggtaaaattcttttaggggaacgattacagcgaacctattcgctttggaaaatccaaatccatgtcttangtacccaggggctttaaatccctacacagcggaaattagacagcggacgattaaacatggaaccaatcgccggctgtccattatggnagttattatggaaatgtc

SEQ ID NO: 914 - DNA, 521 bp; double-stranded, linear
cttacaaatctatcgtttatcatcgcggaaaacggctgacttttttgttgcctaaaattttattgtcaggtactatttaagtgtctccatccgagacaatccatttattttttgttgaccagcggaaactggttggctcctaaatttggtagattcttctgcctttaatacaatcagccaaccattttggttggctatttttttatttttcaatttattccaatgattacaataaaaaggagcgaaatatgtcgctcctttgacttattattaattttaaagatattttactttcttctcgttctacaataaactataataccgcagctcctaacaaagcaatatcagaccagcatagcaaccattatattttctccgtagtggtaagaacygggcttgcactgttcgctacgagatcgaaggtaagctggcttggcgtcttgttagaaagaacgtgggacaggttgcgcgagagcctgcacacgtgctgttgcccgtcaggtgtgcttgcacgnctnacc

SEQ ID NO: 915 - DNA, 576 bp; double-stranded, linear
tccttgtcacacagcgtttatggnttatggttaaggnggttaaaaaggactactgtcttaymaatttgcgttccggccaamccaaaaagaagcmcmgraaaaagttttagaattttttggtatggatacgamcccagcaaatattcagttaattaatgaactaaaatcaggaacttgtttattccaagaccatcgagggcgtagccancctattgcaattgatgttttattcgatagttggttaatggccatttcgtctactaataaagaggatgaagctactcaaatggcgttggcaatggaacaaggatcataaaaaaggagaagtgagcatgaaaaaagtactaccttttattgccttagtcggcttgttattgttgtcaggttgtggamcagatatgaaaaagatattgactgccgatggtggtaaatgggamctagaaaataaaagtccaactactacttacacyttttttgatgatgaamcttttccgaggtataattccaaaaattagtgatagtnggaccgtaccccttacgtggaaaataataaaaaactcnctttggntataaana

SEQ ID NO: 916 - DNA, 750 bp; double-stranded, linear
cgtctgcaactttggtttcgcttttctaaaacaacagctcgattctgaataactcattgattgttgccaattgatcttttgtttgttgaaggtttgtttctgccgccgcagtttgtcgtactttttcttcatagtttgtcgtactcttagtcgcaactgcttgaagattagccaatgtcgctttatgaacagatagttctttttctgctgttgcttgtgttgttttggctgtatttaaggcttgctgacttgcacttcttgcttgttgtgcgtctgattctgcttgttgtgcggtagctaatttttcttgattggtcgctacttctttttgaagggtttctttactcttaaagactggtgcagtgccttcttcataggtatttgcttcaactaattttgtttgattatagctaatgatatggatttttgctgaaatatcatttaaatctcctgaaatagaaactgccatgtttgtttcatttgcatctaataaagaatctaaatgggaatagccagaatgtccatcgttcatcaacatgcttacaagtgcatttcgagcagctttttcaaagtcatacatagaaactttaccttctgtgtcgtaaatcttcccatacttagggtttccataaaagtttngtccagggaattcctttaaaaacaatttcctttgccggccaccgaattggatccgccaatttacgggcccanggattcccaaaattccctttggggggattaancccaaaa

SEQ ID NO: 917 - DNA, 828 bp; double-stranded, linear
attctggnttggnatgttaccattgcttggttgcgctgattgtgaaatgcttaaaaatgacaagnaaaataccgtctacttgaccaagcacggttatttttaaatnataaattggtcaccgtcttaaacggctctacatcagagagatatgttggaagcatatctctcttatcttnatcattatagcacaacaaccctaaaaagaccatcaataaaaaatgcctgagcctcctatttcaaggctcgggcatttttattttagggaccagtcaccaaattccaagtgaccgcagcattgtactgttgtcctttggttccttggttggctggtacttctaatttaatgttctcaaacgtaaaatccagttggtagacgtcactacctgtgaactgttggtttgcgacaacactggttgccacattattcgccgttaagctcaaagaactagtcttaccaactgctttgatttgttcggttgcttcgttataatttgtaaaacttgaaacattcgctggacctaacaataaacgagtcgctgttggcagactatctgtggttgctttcggttgagatagttgcgctgtcatctgccaattcggttgatttttcttaattcgcaagtaagggattgcgtgtaccattttcgtagtaatcggccgcttttttcaagcctgattgttgcgttttactagcaatattcattttccaaaatcaaaggttgggcacgctgatnaagccttcngttgggtgtaatggtccntggggttgtaaccgtcagacgtaacgcatcggggcggctcatggtcggcaaattcccgtaacacaag

SEQ ID NO: 918 - DNA, 497 bp; double-stranded, linear
agttatcttaacgactaattttgcagataaaattggttattataccattgaaaatacagcgcaagaaggtagtctagcaataatcaaagtagacaaagattcaagaaaacgtctagcaggtgcagagttcaaatggcgtgatacggtgacaggaaaagaaggaacagttgtagctgacaaaaacggacaagccctgataacgaatttgccagtcaatcgtgtatacgaaattacagaaattaaagcaccaaacggctatatcttaaataacaagacttaccgagttatcttaacgactaattttgctgataaaattggttattataccattgaaaatacagcgcaaaarggtagtctagcaataatccaagtagaccaagttcagaaaacgtctagcaggtgcagagttccaatggcgtgatacggtgacaggaaagaggaacagttgtagctgacaaaacggacagncctgttacgattgccagtcatcggtatcg

SEQ ID NO: 919 - DNA, 796 bp; double-stranded, linear
tgatctgccacagtttgcgcttgcttcaatgcttcactgtagactttccaactgcttgcggtgtagtctttttcttggtgtttctcgttttctttgatgattttcaacaagttggttttatctacttctttagttggcacttttaccaattgcttcactgccgaacgtaactctgtttctgcttggtctacttctgcttgcgttgctgttgtttgatctgccacagtttgtgcttgtttcaatgcttcgctgtagactttccagctgcttgcggtgtagtctttttcttggtgtttctcgttttctttgatgattttcaacaagttggttttatctacttctttagttggcacttttaccaattgcttcaccgccgaacgtagttttgcttctgcttggtctacttctgcttgtgtcgctgttgtttgatctgccacagtttgtgcttgtttcaatgcttcgctgtagactttccagctgcttgcggtgtagtctttttcttggtgtttctcgttttctttgatgattttcaacaagttggttttatctacttctttagttggcacttttaccaattgcttcactgccgaacgtaactctgtttctgcttggtctacttctgcttgcgttgctgttgtttgatctgccacagtttgtgcytgtttcaatgcttcgctgtagactttccagckgcttgcggtgtagtccttttcctggtgtcyttttgttcctgaaattaattttctaacgctcttcggtaacttcaggagtggtttaacnatgaatgaacgcgagc

SEQ ID NO: 920 - DNA, 523 bp; double-stranded, linear
aacttcagaaaatattaacaggnaatagccgaatnaagtaacgtctaccaagaagaaggactctaccgttcacangcgtgttcaaatcctattgttccgaggtcattactttacattcggcttttctttataattctggttcacgattggcatctttggaataaacgtacattagcggttcttcacgaccaaccgcataggctgcttgtggcacataggcactcatgaaaatatagtcccctttttccactggataccattcgttgtccaaattgtacatcccttggccactaattaaatacgcgccatgctcttggacatgcgtttcaatgtaggcatgactagcacctggttcaaaagataagatatgcatattcatatcaaagtcaaactctttcggcaataaactccaaagtaacacgtctgtcatccttcatattcttcgggttgttggkcatgaattgacccaaccactttataaggttgatggcctgccaacgggctganaagcggnttttaatat

SEQ ID NO: 921 - DNA, 427 bp; double-stranded, linear
tttcatcaaacgacgttcttcatgtttagtcattttttgttttcgttcttttttatcgggaattttttcagtaatcgaacagaatttacatttgaaagaacgaccattttttccttctatgatgaccatttttttggcttctggccgcccgactaacggtatgcggcccttagcagatgaattggagatggctcattataatggacacttactttcctataacggcgcttgtgtcacccatcacggcagtcagcaacaactatttaatcagacaatttcaaagtcattgagtcaacaaattttagagcatttgaaacaatttgacgtaatyccaakgattaatgatgraacattatgtatgtcaatgatgtttttcataacaccttacatttagagactggtgattttaatattattgaatatgaan

SEQ ID NO: 922 - DNA, 650 bp; double-stranded, linear
ttgatttttanggatnggttccggtggcataaggacaactaggtctttcactggcaatcgtcaatggcctattggnaaagatgcccctatctgtattatctgaaaaatcanacaatcataaccaattagaaaggtggttattatgtataacttattaaccaaacaggaaattcagttactttccctaattgaatacttgtatgacagtaaagaaaaagtccccatgcaagtactccgacgaaaatatgaattttcccattacaatatcaacaatttattgaatcaattaactttgttaatttctcgagtcaatacacatgaaaatgtacatattcgtattattaataatcaacagtccatagaattagtcgccgatgaaaatatcccgattgagttaatgaaagaagctgttgtccgcgggtcactaacctatatgttagccctggatttacttttaaaacgctacacttcagccaaagatttttgtgaagagcactttattaacttttcnatttttaaacaagtcagtggccggttaaataatccatccagctaggattaattgggtaattaaacctaaaaaggnggggaaaaatttgngggaacgaggaaggatttcgcaggttnctttaatccctatcctccattcc

SEQ ID NO: 923 - DNA, 494 bp; double-stranded, linear
gggcccccagttccccgtactttaacggaatcatcagtaggtcgcctctgtcgtgttggactnctngcttttcgccactrrttttaaattgactcccagagaaatacacgaacaccaggaaatttcatttaattgtcctctgataattttaggtaaataatagacaacttgtaaaaaactaacttaggtaaaatgataatgtggacttcgccgtcatctggcgtacattggcatcgaaattggtaaagccaccagcagaattcgtcatggtcatcgttaataattgggctttgccatgccaacgtctttcatcgccatcaatttttagtttgtattttttctttttcattaataagcggaaaaattgctttgtaaaggctaaaggaccatatktttgtttctcctgttgggtcacatttgctgctgtatctgctaatagtccaatcgttaaggtcgaaatcatcacatcttgatttaccatcccaaagtcaact

SEQ ID NO: 924 - DNA, 484 bp; double-stranded, linear
tttggctgtatntaaaggcttggctgacttgcacttcttgcttgttgtgcgtctgattctgcttgttgtgcggtactaatttttctkgattggtcgctacttctttttgaagggtttctttactcttaaagactggtgcagtgccttcttcataggtatttgcttcaactaattttgtttgattatagctaatgatatggatttttgctgaaatatcatttaaatctcctgaaatagaaactgccatgtttgtttcatttgcatctaataaagaatctaaatgggaatagccagaatgtccatcgttcatcaacatgcttacaagtgcatttcgagcagctttttcaaagtcatacatagaaactttaccttcttgtgtcgtaaatcttcccatacttaggttttcataaaagttttgtccagggaattctttaaaaccattttcttttgctgcacgattgatcgcatttacgtcatgatcaaa

SEQ ID NO: 925 - DNA, 633 bp; double-stranded, linear
gcaacntatttnacaccttggattancaggttggcccatgtgttctctaccgtcagataatcaaatatggaaccccncggcaatcgctcttcttggctacatccgaatcattttaaaaatacctgcacaactaagttatatattttgtccgctttaaatggttttgaaaacaaaccgatatcaaaaacagttactcgcaaactgtctgatttatcttacaaagatttatattatcaagagatgaaacttttaaaaattattcgttaatatacttatagtggtctatcaaaaaaagaatatttattccgttacataaactttgaaaaaatgaaaaataagaccttcaacatactctatcctgttgaaggccttctctcttatttaaccctttaatttttacgacctctaaataatcatacccaaaatgtgcatacgcaatggcgtgcaattcgtcctcgtgggtgtcgtttaatgaancctttttgaataagaangggtcatacatacctccaccgttcggttctcacgatattacagcaaggactaaccacggacgcgcgataatcatatgttcacatttgtcgcatatcagctgagacactgcgangtacnttgcgcacgcgcgttgcacga

SEQ ID NO: 926 - DNA, 566 bp; double-stranded, linear
tagttttagcagcaacgtcggtcagcatttcagtagaagtattaagagagttgaatgttttaagtagtaaagaaggtgcacgnnttcttggggcttccgtcgttgacgatatcgtggtcgtgattattttaagtgtcgctgtcggcatgattggtgcaagtacaggcggcaatacagaagtcagctttattgttaagttaattgaacaaggcttattctttattgggatwttctttttggtccgctttattgctccctatktactacgtttaagtcaaaaaatgaacattgggtcgtctgttattatcatgtcattgattatctgtttgggcatggcttatttggctgatttagttggtttaagttctgtcgtaggtgctttttttgcagggattgctgtgggacaaacggatgcaaaaacagaaattgatttcaatattgaagctattggctatgccgtgtttaatcccgyctycttgccagcatggcytatcagtgacattwacacgtangaaaggattancttttatttgggaatgacgatatggcgaatttaaccgaaanta

SEQ ID NO: 927 - DNA, 490 bp; double-stranded, linear
tttttgttggcgtgattgggtatgccagttatctttttacccaaaagttattccaagttccttacctcgattcattcgcagccgcttttgtcattggtttgttggcctatttggctgtgcattttcacttagcggtcaacatcgataatatcattattggtgcggtaatgccgttagttccaggtgtggcgattacgaactcttttcgcgacattttagcgggccacctcatcagcgggacggcgcgagggacagaagctatttttattgctgggtctgttggcctgggaattgccttgatttttaaattatttatgtaaggagtgttcaaatggactaattttycatctcyctttagttttttagcgactgtgacgttggattattacgacatcctcgtaaacactggggctgggcatactggcatgacaggctgatgattatawgctaacgcaacttgwgcagcaacttgcaactttaggacgccgga

SEQ ID NO: 928 - DNA, 460 bp; double-stranded, linear
acgctttttctggtgtgacggccagttgcggaaaccgtgacgattgaaagtagtccgaccgccgaaagtagtgccaaggaagagacgcaagcaagtagcgtgaaggaagaaacaacgaaagccagtacggaaaatagtcaagtaacaactgacacgagtcaggaagaagcaacgaaagaagcggagaaagaagaaccgcaagcagaagtggaacaagcagaaacaccaatcattcctaaaccaaaaaaaatcaatatgaggcacttattcattttctgcagaacttatcagtttggattgtgatgatcaggtcattataatccagtatttaccattacgttactatgccaaggtcatggaggcagatggtataatcgaagggnctagttggtcaaggatgcttcaccgtggaacttaaggatgtatatgccacactctgngtatgcnccagncgcattga

SEQ ID NO: 929 - DNA, 394 bp; double-stranded, linear
cctatgtaggctgcgatattcaaagctccgcagcttgcatggacaaatcactggcctacattcttacnaaaaaatgcgggcatcgccgtccccgaatttcggttttcacaacgcggccttccatcatgatatgaacaacatctggcgtgatatagttcaataagcgttgataatgggkaataattaacgcaccaaagttctcgccgcgcatttcattaacccctttagaaactacttttaacgcatcgatatctaagcctgaatcaatttcatctaaaatggcaaacgttggctctaacatcaataattgtaaaatttcatttcgttttttctcgccgccagaaaaaccttcgtttaagtaacgctcagccatttcttcaggcatatttaacgg

SEQ ID NO: 930 - DNA, 1317 bp; double-stranded, linear
ctccagcattgttggtcattttttctaattctncataggagtgttctgcatcactaaatttaaccatttctactttatgaaactggtgtaaacgaattaatcctcgggtatcacgacctgcactacccgcttccgagcgaaaagaaggacttaaagcagtaaaataaatcggtaactcttgcgcatctaaaatttcattattatagtagttagttaacgggacttccgctgtggggatcagcgtcaaatcactttctgcaacttggaaaacatcttctttgaacttaggaaactgaccggtgccaaacattgctttgctattgaccaaataaggaggaatcacttcggtataaccatgttcattaacatgttgatctaacataaaattatagaccgctcgttctaaacgagcccctaagcctttgtaataaagaaaacggctaccagatactttcgcgcctctttcaaaatctaaaattcctaaggcttcaccgatttcccaatgtggttttggttcaaatgaaaaagttttcggcgtactccaccgccgaacttctacgttggcggcttcgtctgcgccaacaggtacgctctcatgaggtaagttaggcaaacgttctgcaatggctgtgcattgttcttgcaaatgaacaacttcttgatctaaaactttaatttgctcgctaacttcttgcatatttagcaattgttgtgaagcatctttttgtgcacgctttaattgtgcaatttctcctgacacctgattacggtgttttttcagttcttcaactttaacaagtaacgctctccgtccttcatctaaagccaaaaagcgtaataaaacttcctcgtccacaccacgtgtttttaactttttctgtaccacttctacattttggcgaatttttttcatatccagcatcttatttccctcttcatgattaaattttaaacaatggtgaattttactttttcaaaaatttcattcttcattcgttggccagtcgctgtgccagctaagccacctaaacccgtttctctcaattctcgtggtaattgacggccgactttattcatggcttccaccacttcatctgctggtattttatttacaattccagctaaagccatatctgcagcgattaacgcattgcctgcacctactgtatttcgtttgacacaaggaatttcgactaacccagccactgggtcacaaactaaacctaataaattccctaaagccatagcaaaagcttcagaagattggcgtggtgttccgccagccgcttcaacagctgcagcggcggccatcgctga

SEQ ID NO: 931 - DNA, 724 bp; double-stranded, linear
cccttgtcacacaagcgtttatggtttatgataaagtagtaaaaaagaactactgtcttacaaatttgcgttccggccaaaccaaaaagaagcacagaaaaaagttttagaattttttggtatggatacgaacccagcaaatattcagttaattaatgaactaaaatcaggaacttgtttattccaagaccatcgagggcgtagccaacctattgcaattgatgttttattcgatagttggttaatggccatttcgtctactaataaagaggatgaagctactcaaatggcgttggcaatggaacaaggatcataaaaaaggagaagtgagcatgaaaaaagtactaccttttattgccttagtcggcttgttattgttgtcaggttgtggaacagatatgaaaaagatattgactgccgatggtggtaaatgggaactagaaaataaaagtccaactactacttacactttttttgatgatgaaactttttcgaggtataattcaaaaattagtgatagtggaacgtactcttacgatgaaaataataaaaaactcactttggatataaaaaataaagaacaattaataatggaaaatgttgaatataaagacggtaaattaaaaggtgaaattggaggcgagaaggactctgataaaaaatngaataagaggtgtctttgaatagaaatcctggtaagcgtctnctatttttgnggcgtttt

SEQ ID NO: 932 - DNA, 342 bp; double-stranded, linear
aaggtacctccagtagttgtattgccacttgccaataattgttcactgctattgtaaaattgaaccgtgacatttggatcagcagttccagtgactgtatagccattggctttgtttccttcaaccttcgtaatagttggcgccgctaaaacaacatccgctggaataacggctgtagctggttgactttcattacctgcgccatctttgctaataatcgtaatcgtwtctcctggtgtcactacgccagctggtagagtcaccgtatattggccggtttcgttagcagttgtagcagcaatgatggttccgtctgcgtcacggacatcaatagtggttttn

SEQ ID NO: 933 - DNA, 341 bp; double-stranded, linear
aaattgccagacctactttttatggagacgactttggaaattattaaaacgacgaaataacttcattcaggatttcatgccaaaagggattacgaaagcctatggtatttcctgttagccaaagatttaggaatccgtggcagaagaaatcatgaccctagggacgaagaaaacgatttaccgatgatcgaatacgcggctagtgtcgccaggcaaatgcgattccatagttaaagaagccgcagatgtcgtcacagacacgaatgaccagnggcgttgccaaancggtcgaaaaatatattttaacgccgttggaaaggaggccattaaganggggattt

SEQ ID NO: 934 - DNA, 519 bp; double-stranded, linear
gacttaatgctattgaagcccgatggatggtgngtaaggtcncgaagctngnggaatcataaaagttaataagcctggttttcctaatgggggcgtcacttaggatagttttcttccattctccaatcctgccggataagaaggtattcgcttcctcctttggagttagcttgataaacagcccttaaagtcatccacagatttcttttcggtctttgacacgtactttatgagcgatattacgagatacatggatacaacaatgctgatattttgctttaggataaatttgatggatagtatctttcatgccttttaagccgtccgtaataaaaagcaagacttcttgaactcctctggagttaatatcctgtagcagctcattccaaacgtatgtgattcagttggagcaatcgcataactcagtactycttagtgccgtcctccccgaaaaccatnggccaaaataaaccgctccttgggataacggtttgacgtttnagtggaatgnaagaagcg

SEQ ID NO: 935 - DNA, 390 bp; double-stranded, linear
catatggggctatacgtcacgattggcattggagataacccattgttagccaagctggccctagataacgaagcaaaaaatacaccaggttttgttgcagaatggcgatacgaaaacgtagaagaaaaagtttggacgatctcccctatcactgaattttgcgggattggcmagcgtatggcarctcgtttaaagatgtcaggaattgartcgattnatgatttagcacatgcagatccgtacatttnaaaacaacgttttggtgtcatgggtttacagctgtacgctcattcttgggggattgatcgaagtttttaggaggaaaaaagacaagttgctaaagaaaagtcntttggaaatagtccaagtattaccntagagattaccgca

SEQ ID NO: 936 - DNA, 443 bp; double-stranded, linear
ctattaaaaaacgtcaagaagaagcaaggaaacatggtaaagcagaaactggcttaaaacaacggccattaaataaagaacaagaaaaacgtatgcnactacgccgtgaattgaagccaagacctcaacataaagcgccaaatgctatcgaaaaagcacaagaaggattaagacaagcgcacgaaaaaggacgtatgcaagaacagaaatctgaagaacaactcaaacggcagcaacatgaatcagctcgccaaaaagaatatgaaaaagatcgattgaaaaaacaggaatcacttaaaaaaattaatgatcaaagcgacgaatcaaccatttaacagcttragaatcaaatcggcgtactggacagcgagttaaaaacgcgaacaggncttcaacacttttgaacgccagggggaaagntcttcaccacaattanccaaagt

SEQ ID NO: 937 - DNA, 228 bp; double-stranded, linear
aggaatcacttaaaaaaattaatgatcaaagcgacgaatcaaccaatttaacagctttaagaaatcaaaatcggtctggacagcgataaagggggcgaaacaggtcatcaaacacttatgaaacgacaaggagaaaaagtacttcaaccaacaaataaaccaaaagatatgaaaaarcaagtggttgntcgtagtccaagacgaacaggacaaccaacgactcgtcaa

SEQ ID NO: 938 - DNA, 330 bp; double-stranded, linear
aagatgtttagttgtagaaaataaacaggtttgggaagaaagtgggacaggagtatttagcttcaagaatgaagaagctactcctgtcccgccgtttattttaggattgggacggatgttctaagttcttcctaaatcgtttctgaaaaaatgaaggagtgagggagaagatgacagraccaatgtggaattgagaagttaggattagaaagcgcatcctgaagggccggttattttaaaccaaaccaataaaagtgaacaattgattccgaccaaacgaggcgaacgggccgtngcatacagcgatttaattnctattaaatncagaaa

SEQ ID NO: 939 - DNA, 314 bp; double-stranded, linear
tacggtcaagaccgagtatggggaacttcatctccagattccgcgcgaccgcaatggcgagttcaagcaacagactgttcctgcttatagacggacgaatgacacgttagaggaganccgtcattcacctctttccgaaaaagtattanccatgtcggaatcgcagacttgattgagaaatgttggggcatcatacacgcccaaaccatgtccatataccaaatcattacagagggtacgcgttaangggggactcatgccgtatgcgtattatatgcgcacgatatcgtaacggaacgcgcaagagcatctac

SEQ ID NO: 940 - DNA, 564 bp; double-stranded, linear
catcatatcaaacaaagaattggacgtgttggcatcttttaggacggaaagacccgtaaaaataagaatcgtcattaaaaaaataccaaaaaaccgtttgtatcgttgttgtccaataaattttacacctaaaataacaaagacaaaggcaataccaatcgttcccgcaatgcccaacatgttagttgctatgctagacgttaggttcataatcggttgcttaatagcagttataatatccatactaaatagtgtttttaccataactgcattaaactctccgagtccttttaccattggaccagacaaaagtctttattgtcgcagaagcatttgtggatggcttcttcaacacctgtccatgaatcntggttttttttctttggtcattaactcgaaagcgttgtcyttgtaagtatcgtaaatcmaatctacattagkggttggctcygtaacaataacttwatttcaycagggttagggtcgggcattaaccgctggagtttgcggtaaacaccaaaaaacagcctactaaaaataggtaagactggctttaccagtggt

SEQ ID NO: 941 - DNA, 1150 bp; double-stranded, linear
aataattgaagacgaaaagaggacgaactgattgtccttctttttttagttatggagggganccattggaagcagtagtagtagaaagagaggcaaaggggatgaaagaaattgccatccaagaaaaagatttgaccttacagtggagaggaaacacaggtaagttagttaaagttcgattaaagaatacacgtgcaatggaaatgtggtacaacaaacaaattaccgaagaaaacattcaagagatcaccacgttgaatatcattaaaaatggaaaatctttggcattagaagtatatccagaaaaaagtatctatgtgaaaccaaatttaggcagaatcaatgtgcctgtcttttttatcaaaacacctattaacagaggagtatttgaagagattttcggcgaaacgttaaaagcataagtaaaggagaaagaaaagccaatgtatgtatcttttgttctaagttgtttgcttssattttctgcctacagtctattaaataggctaaattcgttggaatttgtggatgtttggttagacaaagraacacaaaaaatcacactaaaacgctgtttttatgatacgtctttcaagaamcaaacactaaaagagttagcacgagtatatttccaattaaawgaaataatcaacgtgcaaataaacaagcggtctttaaatacgaatgacatacgtaatgtacgagaactagaggaaaaacaacaagaaataaaacgattcatgttagacgttttagaagatgcttattggaaagaattagcaaatatgccagaagaccaacgacacttagacgattgggatttcttttaaaatgggttattgaaaggaagcaataataaaaaaaatgatgcctaacacaaaaatataggagggaaaaaatgattattttatcaggactttttattttagggataggaatagttggaggttatcagctagccacgttacctaaattgattgaaatgaaacagcacaaagcaatacagaaccatttcaatgttaaaggaaatgagtacacctattatcaagaagacagtgaaaattacattttatccttggaagatacagaatatcgaattaaattttccagaacaccccgttaaaagtggtattcctgaattttaganccn

SEQ ID NO: 942 - DNA, 496 bp; double-stranded, linear
tttaattccacggagacnttgattatggacggttctttcaggattaaaaaatagtgattgggacgctgtagktcataaaaatgcgtactatgkttctggtgtaggtctagctagagaggtggacgtatttctttytcttttggtatgacaaccaaaggaaaagtcaacctatctggtgcgcaatggtttgcctttagtaccaatttaaatgcgaaatcaattagaccataccaaaagaaagggaatccaaaagaaccagaaaaagcaacaattgaattcaatcgatacaaagccaatgtcgttcctgttcttgtgccgaataaagaagtcactgatggtcagaaaaatatcaatgatttaaatgtgaaacgaggcgattctttacaatacattgtgacaggggatacgacagaacttgccaaagtagatccgaaaacagtgacaaaacaagggattcgggatacctttgatgcagaaaaagtgacgattgatttan

SEQ ID NO: 943 - DNA, 466 bp; double-stranded, linear
aaaatgtaaatcccattctccaggcaccacgtgatgtatggggtncgggatgacttgccggaatgttaaaactaacggatcccccaatttcgtcgcacgatcaatggctctgcacaaaattttagcaaagccgtacaccgcatcatgacggtaactcattggcgtagtacctgcatgattggcttgcccttttaagttaaccgtgtagcgacgttgccctacaatactatgaacaacaccgacttggagcttttcgttctctaaaatattgccttgttcaatatgaatttcgacaaatgcttcaatgtcctcacgtctagtttgctcttgccgaaaatcaaagccttggcgatgcatctcatcaacaaactttttaccttcgttgtcagagatatcgactacttcttcacgtttggcttcaccaacgacatttttgcttccccagaaaaccgttggaaaacgactc

SEQ ID NO: 944 - DNA, 444 bp; double-stranded, linear
ttaaaaacttgggcctcccgatggcacgcngccccaaatgctcaaaaatccccngatttttagaggcccntccnccgtagccacggtgtattatcccggactagcgagtccatcctggtccacgaattgcgcaaaaacagatgtcgggattttagtggcatgatttcttttgaattagccaaggatgagcaagtcgttcctttcgtagaagcgttggaaatttttactttagcggaaagtttaggtggcgtagaaagtttaattgaagtacctgccattatgactcacgcatstakccccaaagaaaatcgtgaagccgtgggaattaaagatggactcattcgtttatctgtaggaattgaagcagtcgaagatttattggctgatttagaaaagggattacaagcataarcaaaaggscctcgtctttagacgaaggcgttg

SEQ ID NO: 945 - DNA, 568 bp; double-stranded, linear
gatttcngcacagtccaaagttattggtnattattccaccggcngattggagggaaagattttttagttgaaaaagtattggtncctaatgaagtcagkttgacgtwtmcccacaatgatcgcatgatctttggcggtgtaaccaccgacgactgagtcgttagagattattttgaamnaagaattaggtgtcgattatttcttggaacggcgtgaattaggagtcattaatattggcggtccgggttttattgaaatcgacggtcgaaaagaagcgatgaagaagcaagatggctattatgtcgggaaagaaactcgacaagtgattttctcttcagaagatgcagctgatcctgcgaaattttacattagttctgctccggcgcatcacaagtacccaaatgtaaaaatcagtattgatgagattaagccaatggaaactggggaagcattgacattaaatgaacgtaaaatttatcaatatattcatcccaatatttgtgaaagctgtcagctgcaaatgggctatacgattttagagccgggcagttcttggaataccatgccg

SEQ ID NO: 946 - DNA, 486 bp; double-stranded, linear
ctttccactccgcttttcgcaatcctcaagctggctgtctgttcgcactgtacgctgtgatcttatcattgcacttagcagcatctttctttgctttttctcgacaacgcytgttgttggttaacgtctgctgagcttgatccactactttttgttggtcatcaacagcttgtgtatccgtagccacttggtttttggctttttcaakggctgaaggtgttgcttcatccacaactttttttgcttcgtctacgaccgcttgttggtcagtcactgcttgttgactttgatccaatgcacctttgttttgatcgaccactgcttgttggtctttaacagattgatcaatggtgtctttttcttttttcgcagtgtcagcaacttgttgtttttgatcgacaattgcttgtttctctgttacttgttgctgtttttcagtaatggcttgctccgttgtttctgtagctttcactgctggttgttctg

SEQ ID NO: 947 - DNA, 148 bp; double-stranded, linear
acataacgttccacgatcccacaaaaatggcccaatgcacacccctcaatgattcctttcaagacgctactaaaaaagcttatcacgatatcgcttcatagaaatcgcttgttgcatgaactgctgaacgatatcccgttaataaata

SEQ ID NO: 948 - DNA, 587 bp; double-stranded, linear
cttggtaanncttctttgtgaagccaagcctttcaatcgggaaatatttaaatggaactgccccccatgtctttcaacaatttgatggcggtttcgataggcacttnccgccgtggcgcaccagagcttaacggacctgtcgcaatgttgacatagccaactttgcctgtgggtgaaaccaagccattaatcackgtttcgtcttgacgaagtaaggccccgcgaagcgccgacacctgtgaagacttggttcacgtgttgcggttgtagaacttctgataagcgagccaccatttgactttgattaggatcgccagcccctaagccgacagataaagcgttgttggttgctgcttggtattttttcatgtcgtcaatagctgcttcatcggtttcatagttttttgaaaggacgcctaacacaacatgcccttctgctgcttcataacaggcttgggcattttctactgaattggctaagacgtttaaacaaatgcgttcttctaaataattaggttttaatgacatgacttatttctcctttttgtccataatttcttgtcaatnttgcacgattttgttcattn

SEQ ID NO: 949 - DNA, 468 bp; double-stranded, linear
attncgttggggttgccaccaattatcccccccncaatttaagtgaagtgattgatscamcaagtttattgatggacaatcctgatgtaacgacgaatgaattgatggaagtgttacctggaccagattttccaacaggcgntttagtgatggggaaatcagggattcgccgagcatatgaaacagggaaaggttcgattactgttcgtgcaaaagttgaattgactgaaatgccgaatggaaaagaacgtattttagtaactgaattgccttatatggtgaataaagccaaattaatcgaacgaatttctgaattacacagagataaacgaattgaaggaattactgatttgcgggatgaatcttctcgtgaaggcatgcggattgtcatcgatgttcgtcgagatgtgagtgcctctgttgtgttaaacaacttgtacaaaatgactgccttacaaacatcttttg

SEQ ID NO: 950 - DNA, 65 bp; double-stranded, linear
cggggaaatgaagtacaggcagcagaacaagcgcaaccaaaaacacctgaaaacagttctacaga

SEQ ID NO: 951 - DNA, 730 bp; double-stranded, linear
atcaagcagatgcaagtctaaacgagaaagacttaaaagctgttgctgcagcgattaattcaggaaaagctatagacgtgactgcttcttatgttcttaatttagatcaaaacaccgtcacagcaatgatgaaaaccaacgcagacggttccgttgttttagcaatggggtataaatatttacttgtcttgccgtttgtagtgaaaaatgtagaaggcgattttgaaaatacagctgttcagctgacaaatgatggcgaaacggtaacaaatacagtgattaaccatgtgccggttagtaatccttccaaagatgtaaaagcagataaaaacggtacagttggcagtgtttctctacatgataaagatattccgttacaaacaaaaatttattatgaagtgaaatcttccgaacgtccagctaactatggcggaattaccgaagaatggggcatgaatgatgtcttggacacgacccatgatcgtttcacaggtaaatggcacgctattacaaactatgaccttaaagtaggggacaaaacgtaaaagcaggaacagatatttctgcctacattcttttagaaaacaaagacaataaagacttgacgtttacaatgaatcaagcattattagcagcgttaaatgaaggaagcaataaagtaggcaaacaagcttggtctgtatatctgggaagtcgaacgggatcaaaacaggtgacgtagaaaatacgc

SEQ ID NO: 952 - DNA, 758 bp; double-stranded, linear
tttcaatagggactgttggctgttgtgtaccatttccagcgtgatttaattcccctgttggcgttacaacaacgtcgattggcttgcttggttctgctggttgtactggtttttcaggttctgttggtttagttggtgtcacaggtttttcgggttctgctggtttgcttggtgtaactggtttttcaggttctactggtttacttggctccgttggttgttctggttcacttggctctgtaggagttgtcggttctgttggtgttgtcggttccgttggaactactggtttttcaggttctgttggtgttgtcggctctgtcggttctgttggctccgttggtgtaataggtggctctacagggtctacaggtggctcaattggcggtgttggatctgttggcttttctggtgtacttggttctgttggtacttcaatgggcggtgtcgtagtatcatcagggataatttcttgtgcaaaagcagaaatttcacttcccccaaatagtagtgtggcactaaataaactagcaaaaagattttttttcatcattatttcctccattttaattttaatttgtaagttcaaaatcttcttctgtcggtcgttccattacgaccagttgttcttttgttcttcagctgtaaacgtaattttctttgtcgatgctcgtctttttcattgattaatacaacaatgaacgctatcgtccatkgttgkcttcctctttactcccagggaaacatacttctcgctc

SEQ ID NO: 953 - DNA, 499 bp; double-stranded, linear
aatgccacggttganatccgaaatgcaggaggngccgtgataggtacaggtactgctgatgggacaggggcatttacagttaccattcccgcaggtgaagcaggtgcgaatgaaacgttaaccgccgtagcgaaaaacgccagcggtacagaaagtacgccaacaacgttccaaacgccagcggatcctaatacgcccgtggcgacgccaattgttgagactgtaacaggtagtacaacaaaaggctatgaggtcaaagggactgctgaagttggcaccaccattgaggttcgcgatgcagctggcacggtccttggtactgcaacaactggaactgacggaaaatatacagtgactttagattcaggaacagcaacagcaaatcaaacgctgagcgttgtagcgaaaaacgctagtggcacggaaagtcaaccagcaacggcgacaaacaccagctgatgtcactgcaccaacagttgattacatcacaggnaacttt

SEQ ID NO: 954 - DNA, 1753 bp; double-stranded, linear
ctgttaggcattcatttactattttgaggtgtctggctgaacanttgttgttccttttatttcgtggtcctcagcgtaatggcacttctggtcttctggtggatgngccatcacctactttggctttgtgagaatgttcgcnccttcgcttcancgttaacgatcactttgaaacgaatactccgttctttcgtatcggtgatacttgggtattccgctgtgattgtccgttggcttctttcaagctggttggttttggttcatcaccgacacttgttaggctatctttgacatacgtcagtccttttggtagttggtctgtgataactactttgtttaggacaccattttcgatggtgttgcggaagctaattgtgtactcgatagtttcgcctagttttggtttggcgttattaacggtttttgttgcggctagtttgccttctttcgcttctggtaccaccggcacctctggttcttcgggcggattaactgtgtcatctactttggctttgttgagaattgtttcgcccgctttcgcttcttcgttaacgatcactttgaaacgaatactccgttctttcatatcggtgatacttgggtattctgctgtgattgtgccattggcttctgtcaagctggttggttttggttcatcaccgacacttgttaggctatctttgacatacgtcagtccttttggtagttggtctgtgataactactttgtttaggacgccgttttcgatggtattgcggaaactgattgtgtactcgatcgcttcccctagttttggtttagcgttattaacggtttttgttgctgttaatttgccttctttcgcttctggtaccaccggcacctctggttcttcgggcggattaactgtgtcatctactttggctttgttgagaattgtttcgcctgccttggcttcttcgttaacgatcactttgaaacgaatactccgctcttttgtatcggtgatacttgggtattccgctgtgattgtgccgttgatttctttcaagctggttggttttggttcatcaccgacacttgttaggctatctttgacatacgtcagcccttttggtagttggtctgtgataactactttgtttaggacgccgttttcgatggtgttgcggaactgattgtgtactcgatttcttcccctaattttggtttggcgttattaacggtttttgttgcggttaatttgcctacgttcgtttctggtaccacaggcacctctggttcttcgggcggattaactgtgtcatctactttggctttgttgagaattgtttcgcctgccttagcttcttcgttaacgatcactttgaaacgaatactccgctcttttgtatcagtgatacttgggtattccgctgtgattgtgccgttgatttctttcaagctggttggttttggttcatcaccgacacttgttaggctatctttgacatacgtcagyccttttggtagttggtctgtgataactactttgtttaggacgccgttttcgatggtgttgcggaactggattgtgtactcgatttcttcccctaattttggtttggcgttattaacggtttttgttgcggttaatttgcctacgttcgtttctggtaccacaggcanctctgggttcctcgggcggaataactggggccaccaactttgggcttggttganaaatggttcgcctgccctancctcctccggtaaagatcaacttgnaacgaaa

SEQ ID NO: 955 - DNA, 500 bp; double-stranded, linear
gaggatccccgtgactatgctactgcaattcttgttgtaccaaccgggagcgtcaataattttgtgtaaataactcgtccttctgcaaaataatgggttactcagtaaacattgaagctaatgtatccgtcacttgttggaagcctttatggcttctatttaagaatttttgattgtatgtatcaaagatggatactaggaaacgctctagtgattcttcattttgaaactgctcttttctgcggctgtatttcttgatttgtttattgaaagattcgattaaattagttgagtaaatgcttcggcggataccaggcggaaactcataaaaagtcaataaatcttgattttttatcagtgactgcgtcactttaggataagttttctgccacttctcaatcatactccctaaaaaggtatttgcctcttcctttgagctagcttgataaacagccttaaaatcatcacagatttcttttcgatctttgacacgtacttta

SEQ ID NO: 956 - DNA, 656 bp; double-stranded, linear
acgacacgtgtaggcacgctagaattaaaagtacccagaacacgtgatggccatttttcacccacagtgtttgaacgttatcaacgaaacgaaaaagccctcatggcttcaatgttggaaatgtatgtatcaggcgtttcaactcgtaaagtatcaaaaattgtggaagaactttgtggtaaatccgtctctaagtccttcgtttctagcttaacagaacagctagaacctatggttaacgagtggcagaatcgtttattatcagaaaaaaattatccttacttaatgaccgatgtactctatataaaagtacgagaagaaaatcgagtactctcaaaaagctgtcatatagcgattggaataaccaaagatggcgaccgtgaaattatcggcttcatgattcaaagtggcgaaaggaagagacctggacaacattttttgnatacctaaaagacgcggtttacaaggtacgggaactcgttattyctgatgcgcacaaagggattagtctctggccattaggaaaatccttcaccacgtaggngccaaaagatgccaagttcacttcctaaganatatctttaccaccattcctaaaanattcaaatctttcagagagcggttaaggaattttagttccagtattactagcgcgg

SEQ ID NO: 957 - DNA, 656 bp; double-stranded, linear
cccttattggggaaaggcggcaataaaaaagtaattgtaaaatactgttagggaatcattagataaagtccgtataattgtgtaaaagtaaaaaggccatataacagtccttttacggtacaatgtttttaacgacaaaaacatacccaggaggacttttacatgacccaagtacattttacactgaaaagcgaagagattcaaagcattattgaatattctgtaaaggatgacgtttctaaaaatattttaacaacggtatttaatcaactaatggaaaatcaacgaacagaatatattcaagcaaaagaatatgaacgaacagaaaaccgacaaagtcaacgaaatggctattatgagcgcagytttacgacacgtgtaggcacgctagaattaaaagtacccagaacacgtgatggccatttttcacccacagtgtttgaacgttatcaacgaaacgaaaaagccctcatggcttcaatgttggraatgtatgtatcaggcgttcaactcgtaaagtatccaaaattgtgggagacttgtggtaatccgtctctagncctcgttctagctaacagacagctagacttgggnacggggcgatcgttattcagaaaaattcctcttatgncgtgacctttaagtcggagaaacgg

SEQ ID NO: 958 - DNA, 477 bp; double-stranded, linear
ctgtcgtttctttttggtagtactcaccttctttatttttgtgtgtatttttaagcttatcgaacaacgcttcatactcgttatttatttgcgccatttctttatcagtaccgcccatgtctgggtggtactttaaagctagctttttatatacgcgtttcaattcttctaatgtcgttacatctttgataaatttcatgctaatcgccctttctgattgctgctgaacagctaagctgcccagcgttccaatttttcaattgattttttatcattttcaaggtctgcttttgtgtaccatgctggtatctctttatcagaaaatagactgtagataaattctaagatttccatgckttctctagctttaacagctgattcacattgataacgtaatatcttacayctggctaagtctatcgacatagaataatgaaacgttggttcctcyaccatttgttaaccgtttttccntng

SEQ ID NO: 959 - DNA, 628 bp; double-stranded, linear
gtaaagccccngcccaccttagaaccacttagtggtttaattccataaactatttttaggaggcttacagaaatgaaaaaagcaaaattattcggttttagtttgattgcattaggtttatccanttcacttgcagcatgtggtggtggcaaaggcaaaaccctgaagcggcggtggcaaaggggatgcagcgcatagtgctgtaatcattacagatacaggcggcgtggatgacaagtcgttcaaccaatcttcttgggaaggattgcaagcttggggtaaagaacatgatttaccagaaggttcaaaagggtatgcatatattcaatcgaatgatgcagctgactatacaaccaatattgaccaagcggtatcaagtaaattcaacacaatctttggtattggctacttgctaaaagatgcaatttcttctgcagcagatgccaaccctgatacaaactttgttttaatcgatgatcaaatcgatgggcaaaaagaatgtcgtttctgcaaccatttaggagataatgaagccagcttacttagccggtgttggctgctgcaaatggaaaccaaaacgaaccaaagtccggttttggttnggtggttgaagaaggggtccgtaatt

SEQ ID NO: 960 - DNA, 566 bp; double-stranded, linear
ctttacctcntgngaaatagtacctgcactgccacaatnccaggcgtttccattcgtaatcgatgatggagccaggaattgctatcccatagccattggcgcccttggtcacatcgttatcgccaataaatgtttttccagtcgctttttcaatcccatgaaacgttgttggcgtaagttttgtagcattattgaccgttggattaatcgtcaagacctgataggctttgacatttccaaaccaagtccctgtgctatccaccaaagcagttgtatctgtcgttggtttaatccataaaagttcatcttttgttggatcgacagcttcaaaatccgcaatgtttactttactgtaccaggaattgtttctaatgttgcatgatcctgaaccgttagtttgctagctgagattaaattggctgtgttggtgatcccaattccagcgtttttagatagatgaatkgatccgaattcatggnaagtcgtacnggggtcgcggcagtagcagaacgccattttggatgtnccaccatagccataaattaangccatgggggcattaatcc

SEQ ID NO: 961 - DNA, 534 bp; double-stranded, linear
gtgttcgatttttatgatgataccaatgtgaaactagtccggccctttggcgatacgatggggctacatgaagaattcctaccagctagtaaacggtatatgaatgactatatccagtatgtaacatctgactttttagcaggacttggctttggcgccactcaaatgttaggagagttggaagggatttactttggctacaatgcggatacggggcgtaatgtttacctgaaacccgcattagcctcacaaggagtaaagggctcagtaaccaatgcattagctgcggcttttcttggttctcttggtggcggaaaatcctttagtaacaatctcttggtctactatgctgttctttttggtggccaagctgtgattgtcgatccaaaaggagaacgagtggttggaaagaaaacttgccagaaattgcngatgaaatcaatatccycacttgacyagtaaaccrgaaatcaaggcntacytgatccctaatgggattatgaagaaaagaagatcagaagttagcattattcc

SEQ ID NO: 962 - DNA, 462 bp; double-stranded, linear
taaaaattctaatttgattttatccagcccaatttcttttttccctttttcccagaattcttttgctttcgctgtatcgtaggttaagtagttatttttcttagcagctagttttgtgaaatctgttccatctggcgcaatcgtttgtcccggcggaattacttgatctgtagccgttgattgatcttgcaagacttcktttacaaaactttctttatcaaaagcttgtgccaacgctttacgaatattgttgttcgctaaagccggattttcttttccatcacgaacgctgttcatttttaaaaagtatgtgacgaattgaggaattgaaagaaaggctggattawcmacataaccaggaataaattcaccactagcttawtcactacatccattcatcgagycaamcaattcaccgctgtcgtggggccctaatactgaactttcgctcngtaattactt

SEQ ID NO: 963 - DNA, 661 bp; double-stranded, linear
gcattattagcagcgttaaatgaaggaagcaataaagtaggcaaacaagcttggtctgtatatctggaagtcgaacggatcaaaacaggtgacgtagaaaatacgcaaacagaaaactacaacaaagaacttgttcgttctaatacggtggtgacgcatacacctgatgatccaaaaccaaccaaagccgttcacaacaagaaaggggaagatattaaccatggaaaagttgctcgtggtgatgttctttcttatgaaatgacgtgggasttaaaagggtacgataaagactttgcttttgacacagtcgatcttgcgacaggagtttctttcttcgatgattacgacgaaacgaaagtgacccaatcaaagacttacttcgtgtcaaagattctaaaggggcagacattacgaaccagttcacgatctcttgggacgatgccmaaggcacggtgacmatctctgccaaagacccmcaagcctttattctagcgtwtggtgggcaagaattgcgtgtaacgtccctacaaaagtcaaagccaatgtttctggtgatgtttataattcagcggaaccaaatacatttggtcaacgaattaaaacaaataccgttgtcaaccatattccaaagtggaccctaaaaaagacgtggttntaagtg

SEQ ID NO: 964 - DNA, 585 bp; double-stranded, linear
aagaaccggatatttttctttgattttattccaaaagacattgtacattttcacattttggacatagtaaagttcggcaaataaatgtgtagcaaacaaataataaaaaatttgcggacgaattttctccaattgcggcgtcatgtgtatttcttctaataagaaatgttggactaaatgagtcaacatgtaaacaggtgcttcagtctcatcaaaatgcgctaaaattgcttgtgcagtggcttcatcttgataaaattggtcattggctaacaagaaaaagtacacaaaagttaaatcgtttttgttaaggaaaagggttgtagctgtcatctckkctataaaggctggtaatgtttattaccttctaaataagtttcttgctcggctgaaggtcgatattcggcgccttgcgcactacggacttttgagatagcgaccatatawttaactcggcgtgkcaccgtttccgcaacttctacgtgaaaaaagccatcattttggcggttgtgcgacttccgttctgtaatagncaaaagccagtacacggattantcataaaatagtgtaccaaagggcaatcgc

SEQ ID NO: 965 - DNA, 721 bp; double-stranded, linear
ncgggaaggnaactgtaaagccccttcccatcagcagtacctgacctatcacggcacctccgcattcgnatctcaaccgtggcatggcatcggcagttccttaaactcgtaacctgctgtggaattacctgtcactcctgtgattgttggtgcggttacggttgcttcatccgctggtgtntggaacgttgttggcgtactttctgtgccgctggcgtttttcgctacggcggttaacgtttcattggcacctgcttcactgcgggaacggtaactgtaaacgctcctgtcccatcagcggtacctgtgcctattacggtgcctcctgcatttcggatttcaaccgtggcattggcatcggcagttcctttaattcgtaacctgccgttgaattacctgtcactcctgtgattgttggtgcggttacggttgcttcatccgctggtgtttggaacgttgttggcgtactttctgtaccgctggcgtttttcgctacggcggttaacgtttcattggcgcctgcttcacctgcgggaacggtaactgtaaacgctcctgtcccatcagcggtacctgtgcctattacggtgcctcctgcatttcggatttcaactgtgggcattggcatcagcagttcctttaacctcgtaacctgccgttgaattacctgtcactcctgtgattgttggtgcggttacggttgcttcatccgcgggcgttt

SEQ ID NO: 966 - DNA, 513 bp; double-stranded, linear
agaaaaagtgtgagccttgtgctcacgcttttttgtgcaattgaagttggtgaatctcagcgaaaagagaaaggtaccttaaatagtgtgtttctggtcaatagcacaatgaaatatctaaatacattatgaactgcttttcgttttatgaagagcagtttgtgctatttgagaaattgctcaatttaatcattaagtagtttcatcaatggtgactatgctactgcaattcttgttgtaccaaccgggagcgtcaataattttgtgtaaataactcgtccttctgcaaaataatgggttactcagtaracattgaagctaatgtatccgtcacttgttggaagcctttatggcttctatttaagaattttgatgtatgtatcaaagatggatactaggaaacgctctagtgattcttcatttgaaactgctctttctgcggcgtattctgattgttatgaagatcgataaatagtgagtaaagctcsgcgataccagcsgaaactcataann

SEQ ID NO: 967 - DNA, 534 bp; double-stranded, linear
cagttatcccccngagacccagaggtgcntgtggtnccagaacgaacgcaggcaaactagccgcaacaaaaaccgttaataacgctaaaccaaaactaggcgaaactatcgagtacacaattagcttccgcaataccatcgaaaacggcgtcctaaacaaagtagttatcacagaccaactaccaaaaggactgacgtatgtcaaagatagcctaacaagtgtcggtgatgaaccaaaaccaaccagcttgaaagaaatcaacggcacaatcacagcggaatacccaagtatcactgatacaaaagagcggagtattcgtttcaaagtgatcgttaacgaagaagctaaggcaggcgaaacaattctcaacaaagccaaagtagatgacacagttaatccgcccgaagaaccagaggtgcctgtggtaccagaaacgaacgtggcaaattwaccgcaacaaaaccgttaataacgccaaccaaattggggagaatcggtacacmatcagttcgcacaccatcgaaacgggtctt

SEQ ID NO: 968 - DNA, 791 bp; double-stranded, linear
taataaaatccgtaagaaaacagtaaagtataaagataaagaatatgatcgaatcaacttattgttagacaacgatatgaatagcgaagaaaataataagttaatggaagaagttgtaaattacgaaagtaaagacttaaaaaaccgttcaattatgtattataacaactggaccaatactttttatggcttgttttatctggtagttaacttcattcaaacagtggtgtatttcctgttaagtttctnacgattaattattgcggtcattcaattgttcctattgccgttgttaccgttattgttgttcgcaggactctttttaactgaaacgaacgtctttgcgaattactttaaaacctttggcatgactatttttatgaagggaatggttggttttgcgactattttctttgcaagtttcttatcactagggtttcaattaagcaatcagacagaaaacgtgtggcagaagatattaacgatacttatttatcttcttacaccgcttggcttgtatgtcttccggaaattctttgctaatcttgtcacgggacgtgtttcactttctgatggtgtcgggtttatcggaaatccttttggcacagaagctaatatgcgtagagcggcaaaagaacaaaagcaagagaataaggagcgcangnaacaggcacaagaagaacgtaaaagcagctattaaaaaacgtccagaagnagccaagggaaccatggtaaagcaggaaactggcntaaaaccaanggccattaaataaaggaccaaggaaaacgtg

SEQ ID NO: 969 - DNA, 511 bp; double-stranded, linear
tgctcgcgaacaaagagctgccacacagaaggagttgttagaaacagcaccagaagctagtctcttatctgccacaatgaatattcctggagaagtaaaaaattcgcccaccttaacggctgtttttttagaagtaattgacgaatcgagcaacaattgctggatcaagtaccgattgttaatttttaccggaatgaaaaaacaggtcctgaatattatttggcggtttcgttagccccacaagaattaaaacaaagaatggtcaaaattgaagaaacacatccttatggtcgtttagtggacctagatgttttatggggaatgaggagctaaaaagccttcatcgaggagatttaggctkgccaccacggcgctgttttattkgccaagaagtggccgaaaagtctgtngacgaaatcgasgtcacagtcttgaagcatgccagaagaaataccggaataatttgacccgaaagggcaccaagtgggtaaaaaaatccgtttaacggaaa

SEQ ID NO: 970 - DNA, 522 bp; double-stranded, linear
cgtttgatgtcttatccgatgaggtcgtgatgcagttgccttctgcacctaattatccttcaatttatagttctctaaacaaattattaacctttgagtcctacaaattagaagagttaaccccgaatcgaatttataataaagttgttgttgcgattgatgaagcgtatttaaatgaacgcatcaaggaaattccagcctctttttatgagcgctttgaaattattaaaacgcgaaataacttattagaatttatgccaaaagggattacgaaagcctatggtatttccttgttagccaaagatttaggaatccgtgcagaagaaatcatgaccctaggggacgargaaaacgatttaccgatgatcgaatacgctgggcttagggtgtcgccatgggcaaatgcgattccattaggttaaagaagccgcagatgtcgtcacagacmcggatgrcccagattggcgktgccaaagcgggtngaaaatntantttaaccccgttgggaagggggccataaga

SEQ ID NO: 971 - DNA, 470 bp; double-stranded, linear
ggcggacgagccttccccaggaaaccttagtcatacggtggacaggattctcacctgtctttcgctactcataccggcattctcacttctaagcgctccagccgtcctcacgatcgaccttcaacgcccttagaacgctctcctaccactacacctaatggtgtagttccacagcttcggtaatatgtttagccccggtacattttcggcgcaggtcactcgactagtgagctattacgcactctttaaatggtggctgcttctaagccaacatcctagttgtctgtgcaacccacatccttttccacttaacatatattttggggaccttagctggtgggtctggggctggttttccctttcggactacgggatcttaatcactcggcngtctgactccgggatataaatgaatgggcatcggagtttanctgaatcggtnaccgagatggggcccaaggtcaaaagng

SEQ ID NO: 972 - DNA, 943 bp; double-stranded, linear
cgcgtagaggatcccgcctgatgatccaaaaccaaccaaagccgttcataacaaaaaaggggaagacattaatcatggaaaagtggctcgtggtgatgttctttcttatgaaatgacttgggacttaaaagggtacgataaggactttgcctttgatacagtcgatcttgcgacaggcgtttctttcttcgatgattacgatgaaacgaaggtgacaccaatcaaagacttacttcgtgtcaaagattctaaaggggaagacattacgaaccagttcacgatctcttgggatgatgccaaaggcacggtgacgatttctgccaaagacccacaagcctttattttggcgcatggtgggcaagaattacgtgtaactttaccaacaaaagttaaagccaatgtttctggtgatgtgtataatttagcggaacaaaatacatttggtcmacgaattaaaaccawtaccgttgtcaaccatattccaaaagtgraccctaaaaaagacgtggttattaaagtcggtgataaacaaagtcaaaatggtgccacaatcaaattaggggagaaattcttctatgaatttacaagtagtgacattcctgcagaatacgctggtattgtggaagaatggtcgattagcgataaactagacgtcaaacatgacaaatttagtggccaatggtctgtgtttgccaattctacgtttgtcttagcagacggaaccaaagtgaataaaggggacgacatttcgaaactattcacgatgacctttgaacaaggggtagtgaaaatcacagccagtcaagcctttttagatgcgatgaatctaaaagaaaaccaaaacgttgcacactcatggaagcgtcattggtgtagacgattgcggcagagcgttcacacatcgagatctttcacatgggagttaacyatccggtttgncnct

SEQ ID NO: 973 - DNA, 475 bp; double-stranded, linear
nccaggtactaagakgtttcagtyctckgcgtctacctctaatcagctatgtattcactgaaaagtaatatcctataaaagatattgggttcccccattcggaaatctctggatcatagcttacttacagctccccaaagcatatcggtgttagtcccgtccttcatcggctcctagtgccaaggcatccaccgtgcgcccttattcacttaaccttatcaaccttacggttgggtcttgatcacttcttctagcgatagaaggttaatcaataaataagcaattgaacttattaaaaaactcattcaacgcggtgttctcggtttgttttgattctttttacttcaatatccagttttcaatgaacgaatgttttgagagtagacctctcaaaactgaacaaagtaaagacgaaatgtgtatttccgtaatatcccttagaaaggaggtgatccagccgcaccttccgatacgg

SEQ ID NO: 974 - DNA, 382 bp; double-stranded, linear
ttgaagacagccgattcaggttacttwacacgtcgtttagttgacgttgcccaagacgtaatcattcgtgaagacgactgtggcactgaccgtggtcttgaaatcgaagcaattcgtgaaggtaacgaaattatcgaaccattagacgaacgtctattaggtcgttatacacgtaaatcagttgttcatccagaaactggtgcaatcatcattggtgcggatcaattaatcactgaagatcttgccagagaaatcgtggacgctggtattgaaaaagtaaccatccgttctgtctttacatgtaacacaaaacatggtgtatgtaagcactgttacggacgtaaccttgcaactggttctgacgttgaagtcggagaagcag

SEQ ID NO: 975 - DNA, 496 bp; double-stranded, linear
aacataataatctttcggatacaaataataagaaatgttatttttaaaaataaaacaatattttttaagtaatattaagaatgtgagagtgtaaaatattttgtgtaaatgaaaaaatccatacaaaaaaggaagtcgcttctgtagaataaagttaacgacaaccaattcacagaraagaggacttccctatgaatgattttactacagaaattgtgcaaactctagtcactaaaggcgatttaaatgaattattccgttcgcacttagaaaaagcgataaacacactcctacggactgaattaacggcttttttagattacgaaaaatatgatcgcactggttttaattcaggtaattcgagaaacggttcttactttcgatcaatcaaaaccgaatatggtgaattaacattggaaatacctagagatcgtaatggtgagtttaaacaccaaactttaccagcctccaaagacaacgancattggaaccctat

SEQ ID NO: 976 - DNA, 455 bp; double-stranded, linear
cttgcatagtaaacttcataatatccccagtaatcgaaactttcgctggatcaataaaacgaccactttcatctaaaaacgacattttgtacgtcttctctggaatatcgaatgtctgcactgctcgctgcgcacgcatgatttctggtgtattaactattattggactcgtcactgacgcttcaacttgcccgactacttgttcagtctgttctggtagtcttcatcagctggcggtaccttacttccgtatctgcctctggaaaagaaacgggcgcccgtccttggaaccccctctggacggggactactgtttgggcgggtcctccccttggaacatctgggggncgccatgggttttcagcaattggctgggggatggccattttaatggaactggattaggtnaaggaaccacacaaagcggattggcnaataaacgggtttcctttttt

SEQ ID NO: 977 - DNA, 489 bp; double-stranded, linear
cttgttgtgcctctaagtctcttaatacaccttggtactgctgtagctctaacttcgcattagaaaggtcttcttgtgcttgtgcataagcaagtgtagcaacggcttgttgttctttaagttcctccaatgatttcatagaattttcataggcttcttgtgcttgaaccactgccgcttctgctttgtttaactcgtttaatgctttttcgtatgttggttgagcattttctaaacgagacaatgaacgtgtacttgttttaagcgctacttgtttttgatttaagttttcttttgctaaatccaatacttccttcaagctattcaatgtgttttcytctgctttttgtgcntcytgttttctttcagcactttagcagacgttgktcmatcgctggtgcntccgmacgttggtttcggctttycaaaacagcagccgatccgaataacccatgatgngcatgaccttgttgtgaagctttccgcgtg

SEQ ID NO: 978 - DNA, 473 bp; double-stranded, linear
aattaattacacagttatttagtcaattttgtttaggaaaataagacaagagaggaattttttatgaatcmatatcaagcagaatcatatgatgttattgtcgtcggtgctggacatgctggctctgaagcagccttagcagccgcacgaatgggcgttaaaacgttacttttaacgattaatttagatatggttgctttatgccatgtaacccttctgttggtggacctgccaaaggagtcgttgtccgagaaatcgtgcattaggcggcgaaatgggtaaaaacatgataaaacctacatccaaatgcggatgctaaatactggtaaaggtccagcaggcgtgcgtgcgcgcgcaactggacaacatgccaagcgccanaatgaacataccatgaaaaagagaatttaccctcgcaaggatgtngagattaacgggaaatgcgtttgcggggtgactcacaggcccaacgn

SEQ ID NO: 979 - DNA, 483 bp; double-stranded, linear
acaacgttccaaacaccagcggatgaagcaaccgtaaccgcaccaacaatcacaggagtgacaggtaattcaacagcaggttacgaattaaaggaactgccgatgccaatgccacggttgagatccgaaatgcaggaggtgccgtgataggtacaggtactgctgatgggacaggggcatttacagttaccattcccgcagtgaagcaggtgcgaatgaaacgttaaccgccgtagcgaaaaacgccagcggtacagaaagtacgccaacaacgttccaaacgccarcggrtcctaattacgcccgtggggacgccaatttgtttgagacttgttaaccggktagttaccaccaaaggsttatgaggktccaaggggacttgcttgaagttttgggcaccaccatttngagggtttccgcgatttcanctttggcacggtncctttggttactttgcaacaactttggaactttacgggaant

SEQ ID NO: 980 - DNA, 537 bp; double-stranded, linear
cctntgggccgcccacggaattgccccggcggaaattgccgctattaattcacgtccattcctaaggatttgaacccccngncttgacaagccgttggtggagcgaaaaaggntccaaactttaccgtcgtggaaaacccaactggaggacttaggaatgtttcttctaaagatttagctgcaaargaaaaagaagtagaccaactacaaaaagaacaagcccaaaagattgcccaacaagcagctgaattaaaagccaaaaatgaaaaaattgccaaagaaaatgcagaaattgcggcaaaaaataaagcggaaaaagagcgctacgaaaaagaagtggcggaatacaacaaacacaaaaatgacaaaggctatgtgaatgaagcaatcagcaaagacttagtttttgattcaagcattgtgactaaggatactaaaatagacaagatttacaggtggccagtttattaaagcttccgattttaacaagtaaacccaagggacaatccanagatattttttacaaaatttaagtaa

SEQ ID NO: 981 - DNA, 325 bp; double-stranded, linear
tgtgggtagcggcgaaattccaaacgaacttggagatagctggttctctccgaaatagctttagggntagcctcggaattgagaatgatggaggtagagcactgtttggactaggggcccatctcgggttaccgaattcagataaactccgratgccattcatttatatccgggagtcagactgcgagtgataagatccgtagtcgaaagggaaacagcccagaccaccagctaaggtcccnaaatatatgttaagtggaaaaggatgtggggttgcacagacaactaggatgttggcttagaagcagccaccatttaaagagtg

SEQ ID NO: 982 - DNA, 327 bp; double-stranded, linear
gtaatatcctataaaagatattgggttcccccattcggaaatctctggatcatagcttacttacagstccccaaagcatatcggtgttagtcccgtccttcatcggctcctagtgccaaggcatccaccgtgcgcccttattcacttaaccttatcaaccttacggttgggtcttgatcacttcttctagcgatagaaggttaatcaataaataagcaattgaactattaaaaaactcattcaacgcggkgttccggtttggtttgaaycttttactcmaaaatccagttttcaatgaacgaatgtttgagagtagacccccccaaa
